United States Patent Application Publication US 2004/0219528 A1 - sequence listing, part 2

SEQ ID NO: 128 - DNA, 430442 bp, Homo sapiens
atagcacgttagttgccagggaatggacaaaaccatcttttcctatagagagtgaaaagcaagacaggaaatctaggagaaagagttgagacacacgtggttattctgggcttggggtgtgactttggtattaggctggaaggatgatgctatgtttcctaccccttgagccgtgttgaaagtaggcgtcattgtctctaggataaaaatctgagccaggcccacagaggttaagttttatatccaagatacagtaaatggcagcctggatttgtgctttgcactttaaagcctgttctttgcctattaccctaggcctcagattttatttgacaaatgaaaaggcaaaaaattcttcatttgtagaggccgtttagtgaacagttgtagctctatgagctgtaagggatttccagagatcttctgatctaggcaagatattctttattctgcttttcagaggaagtaactggagtccagagacgttaggcaccctgtccagggtcatccagccaggaagtgactgagaaaggaggccagacttcaaattccttctgactgagtaaggtctcaggtgtcagataagcccatgctggtgttaaaatagactatttaaggtgattgccagctaatctacggacgaagttgggccagcctacgatgtggtttggaccctccagatttggaataaagaaggtgctgagcatatgtggcacatactgttccaacaacttgtaaacccttttttgtcttgaggttcagttttctgagtgggtagtacaataaagtggtttcattactggtgagcaattaatgggttgacatcaactaagagggagagtctagggacatatcacaagattttttttcttgtttataccctcagttttttttttttttttgagacggcgtctcactctgttgccaggctggagtgcagtggtgcgatcttggctcactgcaagctccacctcccgggttcaagtgattcccttgccccagcctcccgagtagctgggactacaggcgcgtgccatcacaccggctaatttttgttttttgtattttagtggagatggggtctcaccatgttggccaggatggtcttgatgtcctgacctcgtgttccgcccacctcggcctcctaattttttttttttttttttttttttttgagacaaggtcttgttgtgttggcctagctggagtgtagttgctattcataggtgtggttgtgctgcgctgctgccttgaactcctgggctcaagtgattctcctgcctcagtctcctcagtagctgggaccccaggccatgccatcacatccagcttgttttttgatgttatttttttagagatgcgatcttgctctgttgttccctaggctagagtgcagtggtgcgatcatggctcactgcagccttgaccttacaggctcaagcgatcctcccacctcagcctcccaaatagctgggaatgcaggggtgtgccactacgcccagctaattttaattttttggtagaaatgggatctctctgtattgcccaggttggtcttgaactcctaggctcaagcaatcctcccacctcggcctcccaaagtgctgggattacaggtgtgaggcatctccccagccttgatgtttatgatgtgttaaataatggaattaagacccagagctctcagcaggataagaaagggattagaaaggggatttcgtgttagttagcagagcaaagggtttggtacagacacatggacatgtgactgaaggccttgtgtgctgggactccagagggagaccacagagagtggccagcacttgctgagcaggggaagagagtgatgatatccatgaaagagacatccctggctacactgggaagcccacattcccttctcagacacttgtggctggccctaggtagtgagtgggtatgggatgtcaacaggaggtatgtcttatgtgacagtgttgggctttttaaaagtcttatgttctattccccttctccaaggcaggtacagaccaaaaacatcccataaagatagttgtctagcataaaatctacagtaggccaggcatggtggctcatgcctataatcccaacactttgggaggccgaggcaggaggatcacttgagtctaagagttcaagacctgcctgggaaacaggaagaccctgcctctacaaaaaataaaataattagctgggcatggtggtgcctgcctaaaatcccagctacttgggaggttgaggcgggaggattgcttgagccctggagtttaaggatgctgtaagctattattgcaccactgtactccagcctgggtgacagaacaagtccttgcctcaaaaacaaacaaacaaacaaacaaaacaaacaactctccagcaaagactcacaacctcttaaggggatgcagtcaaatgttgccttataataagacagtttctcctggtatcctgcctgagttgagttcttactgcttccattttcttctgttctgtcctcagtggagatggagatgtacaccaccttctttccaggcattcttttcttttcttttctttttttttttgagacagagtcttgctctgttgcccaggctggagtgcagtggcataatcttggcccactgcagcctctgcctcccaggtccaagtgattcccctgcttcagcctcccaggtagctgggaccataagtgcacaccaccatgcctggctaatttttgtatttttagtagagacagggtttcaccatgtcagccaggctggtcttgaactcctggcctcaagtgatccacctacctcggccccccaaagtgctgggattacaggtgtaagtcaccatgccaggcctccagttactctttggagatgtgaaggctgacatttaagtctcacctctcctcttgtgcaatccttcttgccaaagatggagttagaccctcagagaggtttgctccccacccagcagtaattaacgtgtcccttttcccagcatggagaggaaatgagcaaagcccttctgttaaaaaaagaagacaaaaatatgtaatacaaccccaggctccagtttgggtttgcaaagtggaaaacaaaacagaaccatttttcaggtacttttatgttaagcctctctaatgtgccccaaaatatttttcaagtgattcatctacaatccaataagaacaacggctgttgccatttggatgaaaggagctgaggagcattagtgagcgatttgattttatgaaggggaagtggcacaggtgcttagagccatttgcttgaggcaccaaggtctatgcccggggcatctgcagctccaggcggggcaactggcagtgctacaagctggataatagacctaccaggcacgccccgccccatggttaatatgggaaagggctacttgcaatggaggctttgaacttgggtgcattggtccccaccactcaaggatctctttatggtctgctaatttagaaaattactatgaccaatgatgataatactaataattcacattcataagggactttctagtttataaagctgccttccatccattatctgacttgatcctgataaccactcttggactggaacagatactatcatccccattttacaggtcagaaaactaaggcttcaagatgtttactgctttgtccaaaattaagaagctccccttctctcatgcccccatttctatatatgggtattcccttgtgaatgtcagggatttttttgttgttgttgaattataatttgagagagggaagagtagcttccctaaagagtagtgatgcgtagagtgactttggggagaagggtagggtcattagccagggaacaggagtggcaagagggactccacagtggcagaggagaaattctggactctgctcttgcaaatacagacttggaggaggctgggtgtagggaacagtggtagcccctatgtggtgggtggggagctaggtagggtaaactgggaacctgagggagggtctaatctcccatactcccaaagaccacatctgctagatgtgtatgcctcttgttcctttcccatttgtatttccaggctgttagaaagtcttatttaatcattctagtctcattagttgtgctttttgggattaaggccaggacccatttccatagcaaaggagttacatagaactctccatagcagagttacatgaaaatggtgttggctgctccgggagcccctcctgttggtggcaacaataaagagtgagagaccgccagggcgagatgaagcttaggcgacagggatcaaggtcgaaaaggctgcagcttgtctcgtggggaacctcgctctactgccaaccacagaggatcaggggttggggattttaaaaagctattgtgataattactcatagtttataagtcaaatcatattttaaaaggcttataacaatattcagtatttctctgtcccacccttcctgtccctcaacctcccttttttgaaataatggctttcaactgtttagctgcttttttctgagatttccacatctctatagttctaaatatgtgtgcattgctatattttaatgtatcgattgcatacattatcagttgactttctgcttttgctttttaagagggtggctcactctgtcacccaggctggagtgcagtggcatcatcgcggttcactgtagcctcaacctcctgggctcaagggatcatcaccccacctcagcctcccgagtagctgggactacaggtgcaccatcacacctggctatttttttgttattacttgtagagacaggtcttgctgtgttgcccaggctggtctcgaactgctgggttcaagtgatcctaccaccttggcctgccaaagtgctaggattacaggtgtgaataatgcccagccaattttctgtttatggtaatgaggatttagtctcttatactaccatcccatctgacaccttcccctcatatgtggtatttaaactttagttaaatgaatagtcagaatttacattatatctgtgtgaatattatttacaactattgtgaaacagttgtttccttacctctcattttgttctgaagttggtaactgccttgttttatcatttgcttagttttctttgtccttaccaatagcctctcagaatgattttccacaaggtcactctctccaggtgatcagtcagcccctgtgtcttggagccttcactcctggacacttctgttcttatgtctggactgcttgccttgtaggcctggtgcccggctgttttcctgggacttcccttggccccctcctccctagactccttttgcctttccctgatttacattccctatttctgagaccttgcatcttcttctttcttggtttactccattgttttgatggagcgtgctctccaggagttttctcagattgaaaagctgtgcagcagctgaggacatggtgacgactgtcctctgcatgccgctgcacaccctgcactctggctggttgccttccacacctgtgcacagcagtctcttttcccctgggctggatctcccgttttctgtagcttacatgttccttttgcttaggttagtccctcatcttgctggaagattttgattttttaggaaagctgattggtggcaggaccctcctgcatgctgcactagtaagtggcagaattgtgactcaaacccaggtctgctggtttacatcaggtgttcctcctcccccaagctatgattctaactcctcctcctgtgggggcccaggagccacaccctcccctggctctcaccacccctcatccacctggcctggcccacccccctcatctctcctcttcttcctctcttgccagcccccattgtggatgtctgtctttctgacaccctgcacctttgcctagactatgtctagggcctgggttgccaggacagaagccccaggtctgtgaggtgacctgggttctttaaactttcctgggtgaacgacctacttggtggtggggaacatgttggggaacatgaggagtgaggccattactgtggcacagccctgctcatggtcctttgattggcaggaagtcaccggaggcatcctgtctatgtcagctggagctgctataacagatcattctaccatagactgagtggcttaaacaacacatatttctcaccattctggaggcagggaaatccacgatcaagatgccggcggatccagggtctgaagaaggcccccttcctggattgcagatggccatcttcctgttgtcttctcacatggcggagagcagagagagcaagagcaagttctgtgtctctttgagaggcacgagtctccttcttgagggctccaccctcctgatctagtcacatcccaaagcctccatcccttaatacttcgtcaccttggggggtaagacgttcaacaccggaattttgagggatgacacaaacattcagcccataacacatccccactacaacatgcctggtagcgcttgcccagaaaaatttccatctgaatcgggcaggtcagggagtagagcgttgcggagaagatcaggtgggaactcacctgaagtcccttacaacttggaaggcatgagcatgtcgaggcggggagtggagagagagcatgcctgtctccttcgcaggctgtctttgggaagatttgcctggcctgctttaaggaggctgcctcctcctgtctgggctctttctctccctcccgtctttacaatcatcacctcctaaagcactgcctttcttgggaagttttccaggtagagtgggagcaaaatggcaattcatgccagaagtcatgcataaataaaatccactgataattcccaagccctgctttagccataagcttcaatctttcttacccactaaaccctctcccagaactgctaaagggaacagcactgatggatttgtgtctttccccttttcatttccgctgttcccttcttctgattgaggaacaaattagtaatgaaatgacccaactaaggccattaaatattgtgcaagaagattggaaagccagaggccttagtaatctctaaattagaccattggacccaaagccgttgagaggtaaccatactccattcactcattcacttcattcattcattcattcagtagtcttttattgatctaatacagttgtgtcttttaatttgaggtatttaaaatgtgtttaaagcgaagtgttctcttgtggattgtagttacctcgaggccatgagccaggttggttttgccagtttggtgtggtgtcctgggtatttcactgcttgggttgaaggacaagcggtctgctagagtgagccccgtaaatgtttgttgttgatgatggtgatgcttgatcaataaagttaatcctgccattgtcaccaggatataaacctttagtcatctgtgtgggcatttctccttgaacatgatgctaaagatgtttaatcagactcttcacagcttccaagagctgggccatgatgaaaaagaccttggcacgtggctgttgaggggaagctgttcccataatgaggagtcagtctgttagtcctggccccatacccactccccacctgtgatcacccccgccactgctggggacccttggcctcagctgtccttagctctagcttgtgggtccttggaggtccagctcaaatttgtctcactgggtgggagaaagaggtacacaggggatggagagacagagttggagcacttgggactcagaatggtcactgagcagatagacgagggctggcaagacacatggggaaaactagaaacagagagagcagtggggtgtggcctggactgggagtcagcaggtgctggtcctggcttctgtagacagtgtgtggatgggcctgactcaagagccaggtgagcacagagctccaggatttggggctcagggaccctctcccagcccttctatctggaggtggcctgggcttacagccaagccaggctctccttgggtccttccacatcccagaggcccacactgagcttggctgcagcaaggctgatggcagggccttcgggctcctgctgattcatcttgctgactccaggctcggggctgctacccaaggagggccttagagtcctgagagtatctcctgaccaatcaatcctctctcccctgggaccgacactggtgactcagggatagagtgcacccgatgaaaggtagtatttgttgtgtgtctctctccagccttatccatgagctccttaatagcaagtcacacacctcctcccacgtgccaggtgcgtggtggggctctgtcatgctggttgaattgagcagtggttgtgctgtgtgattatgctgaatgtatgggggactgtgccgggagcagccatccacgatcacgtcgctgggctggatggtcctccttggttttaggtcttctcccaaagagggaatggtggagggatgatcataacaataatagccaaaatagcaaacaagtcacagtaccagaggctgtggtgacaccttacgtatatggtctcttaaattctcccaacagtcctatgagacgggcactgttttactccctttttgcacatgaggacacggaagcacctggctcactctccttcattcttcaggcctctgtttgaatgtcttctcctttgggaaggccaacaccctctacctccataacattgcatttttgatacttcctggcttttgatgacttgtgtctcttccctgatctgtaagggcaggggctacatctgtcttgctcactattgaacccgtggtgccaggcactcagctggtatggagtagatgctcaataaatgtgtttgaatgaaggaatgaaccaattcttacagcatcactttgtgtctacagaagcattccatcagtctgtggggaggggaggcgctttcctctgtgtctccctgcagtgtccactgagccaagaggtgtcccagacccaggcatctctgtttaataagaattcattgagcacctactatatgcctgagtctacaccgagtgacaggaaagggacccctgacctcaaggaatgtctaacattgaggacatgggaactaaagactatatcttctgcaaagaactcccttcatttgcatttctcctaaagctgtgtcatgctttgagaatgcatcctgcatagccttctaagagttctgggaagagaagaatgggctccctgctcatcaggcttctcagctccagaggaccctgttgtgcccgccatgcctgaggtagactggtggaggtggttcagttatgcacgttcatgctgggatccttcgctccctccctttgaggacacgagcattttggcgaattctgaagagcacacgttttccacttagctcagtctgtggcgggctcatggtgccttggtgctactatctttccatttatcatctcaggcctccctcccctttccctgcccagcctttttacctgatttaattttcacaccttattcagtggctcttcatggaacttgtctgcgtcgttttacttctcttccctctggcgcacgggtcctctcaccatctatcttccaggcctcctccaccccacagaacattttgcaagaaatgcaaagagctttctttccactgtgcatctgggcaggtgctggccgccgctgaatggggtgtgctacttagagtgtgggtgtgggtttggggtgtgtgcgtgggtttggggcatgtgcctcacatacctacccaggcacaagtgtagaactgactcctgctcttgccccattctccctccagaaaccacaggtcactctgacttcctgctgggcgtccctacagatgttggcggccccctcctctcttctccttgtgcttatgaaccaagcagcagaaagccccctggtgttggggagggatcgcaaggagcgcttgaggacgatccaaggccaggcgtggtagcatgtgcctgtaatcccagtgctttgggacaccgaggcaggaggatcactcgagcccaggagtgcgaggctgcagtgagttatgatcataccactaaattcctaggcaacagagcaagatcctgtctctgaaaaaaaaaaaaatgccatccagacggcatcctgctgcatgcagctggaagatgcagccccttttattttctgggaggcaaccataggaaaacaaagtgtgagtggccataatttactgggctcctgggtaaatttgtatttcattctgattattgaatgtgtcgcctaattgcagctataaaaaggaatagtccatcttccccatgaaagcccattgctggctgattgttgtttaattagttgattccagtggtcgaggggtgagtttggaattacaattacaactcctattatttcagggagattgttgaattaattagtaggacaataggattcctcatagttgacatcttaagaatccacaatgataactttaaaattggttgcaaacatgaaaataggtgatagatttgtcttctctgccaggtgacgctagacttcaggaagaccccccatttctgctccactcctgggcttggagaagagtacagctgctcttgactggtgggaccttttgctggctaggggtgatgggagaagcaagagagggatccacacacctgcgcttagctttctatgacctgggcggatggaggccaaaggtaaggtgggatgagagagaataaagacaggaaggaaagggctcagccaagaatgtgtagtgtttaatgcaatgtcgatgaagagctctgcttacagctgtgatggtcatgggcagccaccctagacaggggcaggtggcagtgccctcagagagggcccaagaggtaacaaggccacggtcatgctaggagttctgggagctggatagatccccatagaggagcctgtgttcccaaggcccctctatgaccaccagcctgtgctgggcccgggacatggccggctaatgtttggttctgggtgacctccagccttctggttaaggtcttgccttagctcctgcctgagtcggggtggggagctggaaggactcagctccctgttctcctaagcttgcgctttccttcactttcttgtcgtatttcccctctccccaggagtcaccagaagcatcttctccgctggatataaaagagaaatattgcgctttagctggcttcagcaagaaaggtgataatgagaatataagagaaactgtttatccaggtggttaatatttgaataatcctgaaggtcatatggcatgtttctttcaaggaaagattctgtcctcaccttggtgcatatgtggagaggcggggcaggcacagtgctgtcctgaacttgcatcctgtggagttgctgtggtctagagacatgtggagcatggggtggaggagagccaggtgggtttctgagggggtgagtggactgtggcctgagaggggtgtgtggagggcagaagtcctatgggaagagtgggatgatggagatctcttgggttagaaggggcttcttctggttctgaaggcagttgcccaataaaggtggatgggagcccattccagacaccatctcggggggttcgtcttttcctttttctccactagcctcttacctgatcttccagggctaggtgtccttcaggggccaaaggggctggggagtttcttggaaggcagatcattaagatttaatgggacatttcctgccaggcagagggattgtaaaatgcagctaatttagagagccaggggatcacagagtcattttgcctttcgttgggaaaggccagacatgaaattatgccaatccctgccctcctgtcttcagtcctccccaattataccactgggcagctgctgagctggcccagagtatctgctggacagagcccttccctgctggcggcaggggcaggtgggtgtttagctggctgagggcttagtgaggaaagtggtgttggagcagcatctacgcagccacaagcccttgtgcagtgctcggatttctcagctcggccccaggaccatagccacagcccagacttcctttcctccatcccctgtagtggcttctcagagccttggtctggcagggtcctttcctttcagcagagtgagttggacagttgaaggaagtgagttggtaaaggggtagtggcaattgtgtgtctgtgtgtgtgcatgtgtgtgcatgcgtgagacagagacatagagatgaacagagagacaaaggcagggagaaggagagaaacacgaccagagggcagggaagtagaagggcacctgttgcctcccctggggctgggctgtttggttgaagttgatctcagctgtgtgtctttacccataggtgacaggaaatgagaacatggagggatagatgtgggcacagcctagggagaggaaaggggaggtgagaagttacaacagcagtgggatcctttggggcccttgggctgagatgctggatcagtgctgcccaagaagctggagtttagagctgctcctaggtgtgcaagggaaatagccatagatgtggacaccaagaggttctgccacacacaacatgcatgacctctgtgaggtcccataaaaatgaggataccattgcaaccttacacgtaacacagctgaagcttctagaacatacagggcatccagtaagtccatgttccaccttccctcccttccatagagggggatacacggatgcttagtacagtgccagacacatgcttggcactcagtacaacttggtggaattggattccgaatcccaacagccactcagccactgcccctcggccttgggagctggagtcaggcagagctgagggttgcacccagctggccagtggtctcccctcccggcgaacgccccgcccggcccctggtttctggtaacaccctgctatgtcgtcccgcttcctcacttggctcatctccacaaatactcagagacggaggtggggagggttgcaactgtctccagccccatgggtggctgggtttgagccctgactctgctgctaaccagctgtcagaagttgcgggttaagtagcgggggttgaggcgggagttcctgcaggcagggccatgcttctgccacgtggaagccatacactatccctctgtgagtgcccaggaaggcttggaggcatactcctacctgaatatgatagtccagcccaagtggcatttattgagcatccactgtatgccaggccctgtcccagcactgaggatccagctgtgaacaaggctgcatgatggtggagtggggacagccagccataaacaaggatgattgggaagtgacagcacacgacaaaataacccccccccctttttttggatggatgaggcgtgggggtgcggaatgatgggggcaggtgctttgtagggtgaactgaggagaccacacttatatcagcccctttcagaaggagccagccacacagagttcagggcagagccttccaggcaaggggaacaaggcggtagcaaggtggggacagggtgagtgtcttcgagagaatggacagatggccagggtggacataggggtgcggaatgagaggaggtcagagaagcatgctggccttgtgtgccagggaaggaatttggattttattctaaaataagatcactttggaggagtttaagcaggggagtgacagtatgatttatatttgaaaaagttattttgacagcttataaaggataaatcataggagaggaagagttaagccatgagtagctgtaggttgggtgagaactgacagaggcttggacatagtatggccttggaggcaacagacatgtgtgggcgggtcccgatctgtacagtttcaggtttttattaaggtatgttttacacacagtaaaattccccgtttagcataaagttccatgacttttgacaaagtcctgagttgtgtaaccaccaccacaatcaagatatggaacatctccgtcacctgccaaattcccccacacccccggcagtcacactccctccccacctcccacccttggcgaccactgatcgtgttcagaatgtcatataaatagaatcacatagtatatagctttctgagtctggcttcttccacttggcataatgtatttgagatttatccatgttgctgcatatgtgagtagttcattcctttttattgctggatagtattccattgtgcagaaatgccagtttgtttattcatttacccgttgaaggacgtttggattgttttcagtttttgacaatttcaaataaggctgttctacacatttgagtacaagggttctttctttctttctttctttctttctttctttctttctttctttctttctttctttctttttctttctttctttcctttctttctttatttatttttttgagacagagtctcactctgtcacccacactggagtgcagtggcgcgatcttggctcactgcaatctccacctcccgggttcaagtgattctcctgcctcagcctcctaagtagctgggattacaggtgcacaccaccatgcctagctaatttctgtacttttagtagaaacagggtttctccatgttggccaggctggtctcaaacttctgacctcagtgatctgttcttaccaaagtgctgggattacaggtgtgagccaccatgcctggcctcctttcttttttttttttagaaacagggttttgctctgtcatccaggctggagtgcagtggtacaatcatagttccctgcaacctctgcctcctagggtgtagcgatcctactgcctcagcctccccggtagctgggactacaggcatgagcaactgcacccggttttgagtacagacattgatgtgaacctaagttttcatttctctagggtaaatacttaggtgtgggttctatatggtaagtgtatgtttagcttcctaagaagctgccaacctgatctctgtggtggctgtgccattttcccttcctatcaccaacgcatgagagttccagttgctttgcatcctcactagtattatccttaaaacaaatcttaaaaattttgtttctccgttttatgaggcgtatggttgtatctcatggtagttttaatttgcatttccctagcgacttaagatgtgtcttttcatctgtttatttgccaaccctgtatcttttcttggtgaagtatctttcagtcttttgtacatttttatattggttgttattattgcattttgagagttctttatatattccagatacaagtcctttatcagatgtgagatttgcaaataatttctcccagtctatggcttgtcttttcattttctctctctctgtcttctttaaattacaagaccaagtatacttatgaaaatagagcaaggattaaaacatatgtaattccttgacacagacacttcctttactgtcatttagagaacggtttcagaagacagcctcttggagaatcttagtttgatggtccagattttgtagtttcttgtttttaattgtagtaaaatacacataacataaaatttattatctcaaccattttaaatgtacagttcagcagtgttaagtaccatcatgttgttgtgcaatcagtctctagagctctttcaatcttgcaaaactgaaactctgtacccattaaataacaactcctcattccctcttcccctcggttcctagagaacaccattctgtctgtctctgtgaatttgactactctagatacctcatgtaagtggactcatatagcatttgcctttttgcgacgggcttatttcagttatcataatgtcctcaaggttcattcatgttgtaacatgtgtcagaatttccttccttttttttttctgaatagttcatcatgtactgttttatttcagtgagtggaagatttttctttttttcttttttttttgagacggagtcttgctctgttgcccaggctggagtgcagtggcgtgatctcggctcactgcaagctccacctcccgggttcacgccattcttctgcctcagcctccctagtagctgggactacaggtgcccaccaccacgcccggctaactttttaatatttttagtagagacggggtttcactgtgttagccaggatggtctcgatctcctgacctcgtgatctgcctgcctcagcctcccaaagtgctgggattacaggcatgagccaccgcgcccagcctgaatggaagatttttcacactaagaatagtttgtaggcaggcttgagaagaacctaacagaagtttcttctaccatgagcatctatagggccattcagatacccaggcctgaaaagtaataacagtctttgtttctttttttttttttaaatagtatgtatatatatacatatacattatacgtatgtatatatgtgtatatatataaaacttgtattttaggtttaggggtacatgtgtaggtttgttatataggtaaattgcatgtcatgggggtttggtggtcagactatttcatcgccgaggtaataagtatagtacctgataggtagtttttagtcttctccctcctctcaccccctgccctcgagtaggctttgctgtctgttgttcccttctttgtgtccatgtgtattcagcatttattaggttggtgcaaaagtaattgcagtttttgccattagtgtgttagcacccacttataagtaagaacatgcagtatttggttttctgttctcatgttagtttgcttagaataatggcctccagctccatccatgttgctgcgaaggacattaccttgttcttttttatggctgcgtagtattccatggtgtatatgtaccacattttctttatccagtctaccgttgatgggcatttaggttgattccatgtctttgctattgtgaatagtgcttcagtgaacatatgcatgcatgtatgtgtctttatggtagaaaaatgtatatttctttgggtatatacccaataatgggattgctgggtcaaatgttaattctaagttcctggagaaattgccacactggtttccacaatggctgaattaatttacattcccaccagcagtgtatacgtgttcccttttctctgcaacctcagcagcatctgttatttttttactttttaatggccattcagactggtgtgagatgatatcgccttgcggttttgatttgcatttctctaatgattcgtgatgttgagcattttttcatgcttgttggccacatatatgtcttcttttgaaaagtgtctgttgatgtcctttgcccactttttaatgaggttgtttggtttttgcttgttaatttaagttccttatagattctggatattagacctttgttggatacatagtttgcaaatattttcttccattgtataggttgtctgtttactctgttgatagtttcttttgctgtgcagaagctctttagtttaagtagtttccatttatcaatttttgtttctgttggagttgcttttggtgtctccatcatgaaatctttgccaatgcctatgtccagaatggtatttcctaggttatcttccagggtttttatagttttaggttttatatttaagtccttaatccatcttgagttgatttttgtatttggtgtaaggacgaggctctctattctgttccattggtctatgtttctgttttgtgtaccagtaccatgctgttttgtttactgtaaccatgtagtgtagtttgaagtcaggtaacaggatgcctccagctttgttctttttgcttaggattgctttggcttttcaaacacttttttggttgcatatgaattttaaaacagtttttcctagttctgtgaagaatgtcattggtagtttgatagggatagcattgaatctgtagattgctttgggcagtatggccattttaacaatattgagtctttctattcatgaacatggaatgtttttccatttgtttatgtcatctctgatatctttcagcagtgttttgtaattcttgttgtagggatctttcacctccctggttagctgtattcctaggtattttattctttttgtggctattgtgaatagaatcgtactcttgatttggctttcatcttggacgttgttggtgtatagaaatgctactgattttgtacattgattttgtatcctgaaactttgctgaagttgtttaacagctctaggagcttttgagcagagactgtggggatcctttctcttgtctgattgctctggctaagacttctagaactatgttaataggagtggtgagagtagccatccttgtcttgttctagtactgcaggggaatgcttccagcttttgctccattcagtattatgttgcctgtggttttgttatagatgactgtattaggccattcttgcattgctataaagaaatacctgagactggtaatttataaataaaataggtttaattggctcacagatctgcaggctttacaggaagcatggtgctggtatctgctcagcttctagggaggcctcaggaagcttacaatcatggtggaaggtgaagagggagcaggcagttacatggtgaaagtgggagtgagtgagatagagacagagacagagagagaggtaaggggagttgccatacacttttaaatgaccagatctcatgagaactcactattgtgaagacagcaccaaaccacaagggatccaccctcatgatccagtcacattccaccaggctccacctccaacactggggattacatttcaagtgagatttgggcaggacaaatatccaaactgtatcagtggctcattagtttgaggtatgttccttcagtgcatagtgtgttgagggttgttaacacgaaatgatgttgaattttatgaaaagccttttctgcatctattgagatgatcatatggtttttgtttttagttctgtttatgtggtgaattacatttattgatttgaaccaaccttgcatcccagggataaagcctacttgatcatggtagattagctttttgatgtgctgctggatttggtttgctagtattttgttgaggatttttgcatctgttaatgtgttcatccaggatattggcctgaaattgtctttttttgttgtgtctgtgccaggttttggtatcagaatgatgctgacctcacagaatgagttagggaggagtccctcctctttaattttttggaatagattcagtaagactttccgtcttttttaaggttgaataatattccattgtatgtttataccccactttgtttatccatgcatctgtcaatggacccttgggttgcttccacaacttggctattgtgaataatggtgctgtgaacatgggtacacacatatctctttgagactatgctttaaattcttctgagttcttttcattctctctctccctctctctctcttttttttttttctttttttttgtgagacagagtctcactctgtagcccaggccgaggtgcagtggacctatctcagctcactgcaacctctgcctcctggttcaagcgattctggtgccttagcctcctgagtagctgggattacaggtgtgagctactgtgccgtgccctttccattctcttaatagtgcctttcgaagaacagtagttaactttgataaagtctaatttattattttttcttttatacattgtacttttggtattgtatctgagtattgcctaatccaagatcacaagtgttttcttctactctgatctagtttgagttatttttgcatatggtgagaagtatggattaaagttctttttttgtttttgttttttttttttgcaaatgggtatccaatcattttagcaccatttgttgaaaagtctatccttcctctagatacgtttttgagataaggattgacaaggtgtgattttggatgtggaacatgaaggagggggaggaactaatggtgactgagttctggcttgagaaactgattgggtcagggtgccatttctaagatgggagggtcttggagagaagcacctttagcagttgggaattcagagttgtgttttagagatgcccatggggcataagagtgtccaggagacagctggacatatgagtctggagttcaggacagaggtaagagctggagataggcattttgcaaagcattggcatacacagacaggtgtgtgagctgacacttggacatgtgttgaatacagccatggagctgtagttgtagcaggagctctgggtggagtacatgggggagtagggaagagccttaggggaggtcatgtgagtgggtcttgaaggatgaagaggagtttgccaagagataatctagggggtggtttttcaggggaagtaccagaatatgcaaaggtttaggggcatgaagtgtagggtgatgaggaaattgaaaagagtttagagtagccgggggaaaggtgcatggggaggaggacaggcgatgaggctgggagagaaagcagggccagttcaggaagggccttcatttagggagagcagtttggactttcccacatagacactggggaattaatgaaaagcctgctgtaagggagtgcctattgcttccttcctcagagacatgttttaggtgggtcaccagggccttggtgtgaattagaggagacaggaagatcagcgaggagttctcctttactgccagatgccgagtgtgtggactcagcggtgcttgggatgggaagtgagaggtgacaatgggacattcgggtgaccttgtcttcctgttgtagtctcccttccctctgtcccacagcaaggggacccttcctccgacctggagagtatgtttgtccctagggatccctgatttgatcaagccccagggtgccgagaaacctctccctgctttagcctctccattcctgatgtgtggttaggatcaggccctgcagtcgcgctgccccaggcatagtagtgaggggaggtccagattctggccttcagggaactggtgtcaggtctgatgcctcatccattggcctaatcagaccctgtcaggaatacagatgtgatgctgtttcttcgctctgtctgaaattgctttgtaataacagtaggagttagagaggcatttttattgattaaacaatcgaggcgatttgtctttacaaaactgaaaatatagaggtgtctctttctctctctgtatgcattacacatgcttatttattagaggcggcagtctctgcttgtaatcaagctgatgtttatgatggggctgttttataaagccaggcagagatgatataaggggaactggaatgaaaagaagccctaatataacgacaccgacaatcggggtgagaggcccctggggaaggcaccgcggccagtgtgagtacgtgattggagggaaacttggagctactttgacatggaaaaaaatcttataatgtcacatggaaaggagaccgtgagctttggatcagatagctcagggtttgaatcttagctctgccatttattgcatgtgtcacctgggaaaagttacttaaaatctgtgacactcaaaatagggataatggtatgtaatgacatagcatatgtaaatcgcttggcacagtgtcagacatatgtagttattattatcatgatgtctccagaatggagttctaggtaggaatgggcatgttaaggtgcttggaccagtaacttgtgaggggagcaagtcaggagctctttagggttgattttcaggcccagcccattcatcctagaccgtttgcaaggccagcctcgccatggctcagccagtggtcagctacgcttagtcttggggattttaggcctgctggactacctggccaggtaccagtcagctctggtgctgagtaagtctgtggggtggcacaggcaccagaaggctagtgagctgccttttgaattgggtgggaggagcagggccttgttggacaaggatgccactgccggagcaactagctgcattattaagagatctttctaattccatcctgatatggcataattattccagctctgcagggctcagtatgaaaaccgctgtcagtcacttggctgccgggatttgtcaaactgtattcatgaatttatcactccagactgtgagctgtgacacactgactgggggtgggctgcaaattcaggagggcaggtgtgtgggcggccagaggggcacgagacagagatgtccagagcacctgtctctgctggtgtgtggctgggcttggcccgctcctggggccacccggaatccaggaggaggtgaaatagcttctggccctctggtttctcagtaccccagttcaagatctatttgcgggaggcttcttggagtatggtgttcttgaagtgggagttttaggaagaggtgatcatcctgccagccaactcctttcctttttgcctggccaccagtcacccagcacatacctggtacttactctgttcaggcatagagggaacaatgcagtgggccctctatggtctcaatgggatggggagaccgcaggcacgacacagggtctttccttggctaatttttgagtaggttttcagcagggacttactgcgatccagactggtcaggaaagcctgacagcagaagtggggtttgtgggaggactcagtgaggggtggtggctgccgggaggcatcccaggaggtcaagggtgtaagtcaaaggaccacacagttggaataatgaacggaagagtttggcggcaggggatagtatagggcaggcttctcaacattttgggccgcacaattccttgttgtgggggtgctctcctgtgtactctagggtgtttggcagtctccctggcctctacccaccagatgccagtagcacgccctgtagcccccaatttgtgataaccaagcacaattctagactcactgcatgtctcctgggtagccaaggtgtctccagttgagaactgtcggtatagggggtagagctaagagtgcaaatgttggctgggtctggaaagtctagaagagccttggctttcaggtcaagaaagttgggactttattctagaaataacgaggaggctttatgagcagatggtgcagagaggctgtggtatcaggacactgccaggaagttttgctcaggatggaactaccttctctgctaagggttggaaaaatcagatgccctctgggcctcaactgagtggtgacatgcaccaagcaggccaagctgaaggcagtagtggctaaacaacttgtaataggctcaagaatttgcatttctaacacgtttctaggtgacactcatgctcacactgctggtctggggaccacaccttgagagccgctgcactacatcgttttaatttactgcctaggccaaccataacgcagttggcaggctgtaggtatacagcccttatttcttcctaggagaagtcaaaatcctaccttggccaccatctaaatgccaagggcttttctagagagggcttgacagattggatacacctgcttttgactgaagataaagcttgggaactcctgctagctcagccctcggaacctccacgctgctggccacccgtgtctcactatagcagtcgagtctcttgaattagatgcaactcctgcaggacagggctcaggacgttggaaatctgaacaaaatccttcagccagcggccaccgtttgctctgggagcattccttttgcattccttggctcctaagggaacccagaaagcaaagcgtaaccctccccgaaccctcaggtctctcaccacccgctgcctgcccagcatctcctatcatcacaattcccggcctcaacaggagacaggcacatttgtctcttttcatatatatttaaaaggtattgatagccaaaaaggccagagggacacacacagtcctgcttgggcagctggcattttcacacttctttatcccttcactcctagaaggccagagcaggaaaggacctcaaaggtcattggacccaatcccctgaggcccagggagggaggtgagggttgcagggtaacacagccaaagagaggcagaggcagctttcagtgcttttgacccatgcatcctgctggttcaaggacatagctgtgtccaaggccaaggtctggagctgggaaggagggtgtgtttcaatgcgtttttcatccatgaaggattcctttcattgcctttttcttctttctctttagtgtttcaaccagagccttcaccttacccctgaccctgcaccctactcatgaccctgcaccttgcccctgacaccctgccttcaccttgaccttacaccttacccctgcctctgcttcctctcatctggccccaggaggcctccacctgcaggccttagcactgaattcattctgcctgggcagaacatttcctcccagccacaggctttgtctgaattggaatgaaattgtcttgcagaatctgctctcttacctggaactagcacttggccttacatgttagtctggtggcctgggtctgcagccctagatgagtcctatcgatgcctccctgcaccctgacatccaggtgcacccggctgctggcgtagcattgtgattattgctgtatttctaggctgagcacagtgcctggaatgtaattggcactcgcttcaattgtagagtgaataaatggatgaataaatatgctttgctcattcccttgatttggactcaggcctcttctttgggaaccccaaggctcaccatatggtgactcaagcatgactcagggattttaggcccctcagaagcagcttctgccacagggtccttgcctctaggccttggctagcctttcatttgtggaatacttagtatatgccaggcaccttgctaagtgatttatacagattgttgattcagcaacctctgagatgggtactgctatctctgtcctcctggcaggttaaatgaagctgttgagggttaagggacttaacgaatccccggcttccatccttcccggggtttctgtaggccgactctcacctgaggcccaggacactcccaaatgatgatggtcattgccaagaggtgttatgtttagtggttaaatcacaggagatctggctgcttcacctgcttccttctcacactggaagcgtaaatggaggcaagtcaccatactgcgcgatccagccacatgtgaaagaataggaccatggtgtctgaatttatcgtctctgcttcccttgcacatctcctcccttgactgtgggaggtacccaggtggtgtctcccacagtcaagggaggagatggacctgggcatggctgtgcacctggatgtcaggaggcagggaggcatcactaggactcacctggggctggtggatgccccttgaccctgcctcccaagcctgtatgtagctgggctgtgatgctggcagatgggcctaggcatgactgtgctactggttggcagggaagctgatgccttaatagggcaccatcccatggctgccttctcgatccaactccatcccatgttcactcttcctcttggtgtcttcccactagccatagcactaataaggttagaatttaatgtaaaagcgtgttgtaagggttaactgtagcatacactcagtgtgcaccccagctgccttctgcctcctctgggctttttgccttcttccctcttccctccaccacagcctcttctcagaagttcccctagtcagtactagggatgaatgtacccagctttttcctctgtctctttgtcctagacagctctgttgtgtgtttgcctatggattgatgctcatagacaaacattttgggtacaagtgaagtgctgatgcttgcatttttataaaataagctgcacaatgcctagtccatgcctcttcctcctgcatccctcctcctcttcttgcatccctccctcctcttctgtatttgcatcggcacagggactgttattcccaccagctgaatcaggggagagatcttggaagagtaattaatttgagcagatgtgtatcagtgtcctaggaaataaaagatgtcagtacaaaccactcgtgcaggctccactcaggtcacaaagccctagaatgcgggtggacctctctttaggaaaatccaataggtggaggtcatttacatcacaaaagaccttgctttacagaaaaagatttgctgctggggtccttaaaatcagagatcttttggtttatttaagtgttttacaggtcattaagtacttgacagagaggctttagggactggaaaactttatgttcaagcttaagaatcagtgccaattacagatccttctgaaaagatgatgaagcagcccagaacttgtgcggaagtccatggggaaatgccgtctgacctgctaacgtgtgtgtgcacacgcctcttcggagatggccgccgtcctacgatggcctggcaccccctacgtgattgtacctgtttttctttaatgacgaaccctgagaacaagaacgaagcttgctgtgctagtttcccagttgattctctcctctgctcggtactgcattccgttgggctggaagatttcctaactgaaaatcatagttcaatgcagggggcttttgagattttttatcgaatgatgtttctcttgtggactccctttctactccccaaagcttggatttcctgcctcctctggcttcagatctccctcagcacttcccacaccctccctctgagcgcagcatctcacctcagccttcagggaggaagcagaagacatcagactggagcccctttacaccctgaactctgcaagcccgcctgacctcccacccacatgtgcccctcctgcaactctgaggggctggccgtccgcatgtctgcctcccagcccctcaccttctcagggatctcacctttggatcattcgcagcaaggcagggatgtgctctgttctctgtcatctttgaaaaagctggctgggtgtggtggttcacacctgtaatcccagcactttgggaggcccaggcgggcagatcacctgaggtcaggagttcaagaccagcctgcccaacatggcgaaatcccgtctctactaaaaatacaaaaaatcagctgggctggtggcgcactcctgtaatcccacctactcaggaggctgaggtgggagaatcgcttgaacccgggaggcagaggttgtggtgagccaagatcgcgcattgcattccagctggggcaacagagcctgactctgtctcaaaaaaaaaaaaaaaaaagccgcctgcagttgtacctcttcttctgttccatttctgctcccttttgtagccaaacaactcagaagagttgtgggcatacactgcctccacttcacctcccgatcactctcctgcccacttcaatctggcggctgccccaccaatccactcaacagcttggggaggtcgctagtagcttccatgttgcccaatcctgtggacactctgctgtcctcatcttggttctcagcagcattcgacacttccctcctccctcgagacactttctccaggctctcaacactccattcctcctgcttcccccatctcaggtctgtctttctcgtatccctttctgttgactccccctttactcctgtctaaatgtcggatgtcccaagccttgccccccacttctctaactgtatattctctctgagtgaactcacctattgccacactttcaataccatctatacagtgatgacctccaactttctctcctgagtgctgttctagcagttccatctatctatctacttgactttttcatttgaatatcctccatatatcctaaacatggaaaaccactttattcctcttcccaaatctgtttctacctctttccccatctcagtaaatggcacaattgtccaccagtttacaagaccaaaagaatgggagtcattcctgatctctccgttctctcactctccacatcccataccccaccaagtcctgccaatttacctccagcaggtgcctcaaatttatacccttctctctctccacttgccctgccacccttcagtccaggccaccaccatctctcctctgacctaagacagtagcctcctaattggtttttctccttccacttctcttgttccttgttcttcacacagcacagcattttaaaaactatgcatttcaaatacatcatttaaattgtttcatgctactcttgtgcttcaaacctttcagtagctattcattacccttagaataaaatcctgctgggcgcagtggctcatgcctgtaatcccagtattttgggaggccaaggccggcagattgcttgaacctaggagttgaagaccagcttgggcaacatggtgagaccccgtgtcttaaaaaatatatatacaaaaattagccagtggcatttacctgttgtcccagctactcaggaggctgaggtgggaggatcgcctgagcctgggaggttgaggctgcagtgagctgtgtttgcaccgttgcacttcagcctgggcagcagagcacaaccctgtctaaataaataaataataaataaataaataaaatcgtaactctttgccatgccttataaggcccttgtaatgccgtatagggtatgatctggcccatctaattctccagcctcctcttgcactgtcttcttgatcagttgccttcctaacagctgtttcctcccatcttccatgtcagcagaagcctgattttgttcagatatagggtacttttcttccatgaaagaggtggtggtattttcagggaaggtgtgccctcctgtgattcactgcagttgggccacggttaatccaattcactcatagccgtaccatgactccattgccactgattggggtaagtggtgggactgaagagaatgtctgctggtggctgtgggaaagatgggctgccctcatacgagagtgactcgtgaagaggagatgcctgcatgcgtccttcctgctttaggggtgtcggagggtgaggagccacccccagcgagggagacactgtccacataccgaggaaggcagatggaaggagcaggcctctaaagccacagatgagtttcaggatcaaccacaaagttgccatcctcctcttcaaagggataatgaatgcctttatggttccagccacatttaggaaggccgtctgttgcatgtggctgagcacatcctaaccagtatctttcctcccgctcgctgtgttccactctccctggccttgcagcccgtggtcgtgctgtgccctctcctgcctcgggagatgtgcacacgccattccctctgtttggagcactcttcgtcctgcttttcacacatcctttaagtttcagattgttttcacataaaggtttctctgctgtattattttctttatgtctgcttcttgttagtttcatccacagcccctagcacattttgaaattattttttcggtatactttttttcttcccctctagactgtaagttccataaaggcagagactgtatgtattttgctcaccttacaaggtgcatggcagagggaaggtgctcaccacctgtttactgactgagggcgtgaatggaggagtggtgctcatcttcctgaccttatcctctgctgcttgatgacctctcacagtttctactttagccacatggaatggtggtttctagaatgttctttagtctctgtcactttttagtctttgcatatgcatctcagtttgctggaacagctctcctccttcacccagacacctcccactcttctgtaggtctcagctgagcttccacttcttcctggaagcatccctctgctgaccatgtgccctggggacactgctctcagcaggcagagcacctcccagtctgcactgtaggcccctgattgcttttgtatttattatttctatttttcgagatggagtcttgctctgttgcctgggctggagtgcagtggcgtgatctcagctcactgcaacttccacctcccgggttcaagcgattcttgtgcctcaccctcctgagtagctgggattacaggcgtgcgccaccacggtcagctaatttttgtatttttagtagagacggtgtttcatcatgttggccaggctgatctcgaactcttgacctcaataatccgcccgtctcggcctcccagagtgctgggattacaggcacgggccactgtgcccgaccgggatggcttttttaagtcaccgtatccctaacatgcagcctgtagtaggtgctcaaaaagtatttgttgaattagttcctttgattaatatttttgaatgcccactgtgtgtcacacattgtgtgaagtgttgaggttataaagatgaaaaagaaattgtctccattcttacattctagaaagggagacaggtctattaaccagtaaaaaaaatgcaacgtgatgagtgtgggaaaagaggctgtgggaacaccgatgagggaacaatgaaatcttccagggaagtagaagatggggtgttagggagcgcttcagagagagactggagaaggacagagtggggttcaagccagcaaaattatttccaaaggggaaggatggatgtctgtgtctaggtgtgtatgtctatgcctttatgtctatgtgtctacgttgaagtctatatgtaagtctctatgcctaagcctctgtctctctataaagcatatggagaaggggccacactggagaagtaagggagagtatgtgtagggaaaatgagggcagagggtctgagaaggggcttcagcagttagacttgtttttgtttttttttttagacagagtgtcactttgtcgcccaggctgaagtgcagtggcgccatattggctcactgcaacctccgcctcctgggttcaagtgattctcctgcctcagcctgccgagtggctgggattacaggtgcccgccaccacacccagctaatttttgtatttttagtagagacagggttttaccatgttggccaggctagtcttgaactcctgacatcaagtgatccatccgcctcggcctcccaaagtgctgagattacaggtgtgagccaccgcgcctggctgagatttgtgttccatccagttctcccctcacttggggcttctatatatgtaagcactgggggcctcaggacccctggcttagtcaacggctgctcccagagctgggaacatgacagcttcatgccagggcagccccaggtagctttgttcttgggcccctggatgccagaggcagctccactcaccttgcggggccgctccctctccacctgggttccaatctggttctgctccttacctgctgggtgacggggcaagtgccttcccaccatgatgaggagatgatgtttcccgcagagggttctggggaggatgcagtgagatcatgtatgcaaagcacccctcttggggctgcacacggtgggagctgggcagttgccagttccctctccttcctctccctccttggctgactacccaacaggtgaagatctgacctgttctctgaccgagccccgggcgcccccagctgagccccgtggcaggcagcagagtctcagtgtcacataaaggcaatttctctagctgattctttttaaagaacaaaaagcaaattgcctctcagtcttacttggctgcctcagccgtgcgctttgccagagtgtttgcattcagggatccgtgggggtcctgaggtggtgggccatgcgtgctgcctgttcagtgcagccccccgctttgtctgatttcctaatacagtgcagcattcgaatttttctctaagcatctgaaagcgaaagggaaattgtgactgtggatgagtcccttttagcgacctctgtgagatctccccaaagttgttctccagcccaattagaaacctgcctgactttcaggagcgggagtgcctgccgttgaagactcctgttccgagccctaattactgcttgatggaatgaataaagacgtcatgttttctgcattttacttagagagttgctgatgcggtgaatgttggatgaaacgtctctttcctcagagagattaaaaactaagtgcctcagcgacagagccaagcggctgttttaacaacagacttcccctcctgcgctcccttggcctcgcagttggagctggtctgggccccttctgttctttccactcttctggaatcaaggtggaagatgccttgaccatcgaatttgactgattaaaaaagagacacaagcatctgttgagcccttgctgtgcatccgactttttccatccattctctcatttctttctcacagcagcgttatgaaacggcttgctgtgccccttgtgcagatgaggaaactgaggctcacagagttagtgtcttgcccaaggtcatctggatagcaggtagcagaacggtggtttgaattcaacctccagtgcagagtttgtggtctttctccatcggctccagggacatttcctggcctgcgtggtggaacctgcccaccccctgaggagccaaccagttcttttccttgacagagaatggcacggtatagtggttaactcccaccatatgacaaatctccccaaaacttagtggctcaagacaatgaacttgactattattgatggctctgtgtttggctagatggctcctttggtcttggccaggttgtctggggctgcaggaactgggatggcctccctcagtatcagctgtggcaaggaccacatggcctcttatcttccaagaggctcgcccaggcctgacctcttcctcacacattctccatgtccatgtagatgtagatatccattcttcctctttgaaagtaactgagctggcttggaccctgtctatcttgcagaagagggaagcctgatgcctaagtactttttacatcctctgttatttcatgtctgttaatgtccggttggccaaaggaagtcatatgtccaagtccagactcaagggatggataatggactccttctcttgatgggaggggccaagaagccccatttgaaggggtgtgcctgcaggaacgaggaaggctttgtggtcattctgcgttactgcaaagggtaacacccactcttcaaaggccatttcacagctcctggtcctgtaaactaagggtgtggagagggggcttactgagcttccacatctggacgggatatcacgaggctgtgccagacagatgcctcattttgtttgtttgatgcgtgtgttgctgttttttaaacacgcagagaatgtgaaaacacaacttcccttttgaattgatccttgttctcacaactagtcattacctttcatgattgttattaatatttccctggaccagctgctgcagatgaacctggagtgcatgtttggagttggtggtggggaaggtccctgttctgggcttgaggctccagggatggaggaggggacattggtgccccatgcctgccctcttctcaggctcacagcatgccctggtttctccacctggacttaacagagtttccgccgttatctgggagatgaagaccagagggttttaggccctttgaaggaaggaacggttcagaagaatgagtcagtgatggagtctctagatgtcttgccagctccatctctgctactgtattctcagccccctagcctccctcttgtgcttccagggatatagtgccccgttttcagtgcagaaagtactttgatcagaggtttgtgaaaaccagtttcaaggctgccagctttgggtattcctggggtgtgggcctcagttccaggttgccctgaaactctcctttcagcagggagagaaaaggcagtaggagctacaaacaccttgggccttgtcccccagctcagccttcttgggtgactcacccgagcaaggagcaagtcaaactcagcacaagggaacccctgccccagagcccgtgacataaaggtgaaagaaaggcttttggtgtctcttgcagccagagtatgtttgaacattagaggctggttttaggtttgacgctttctcatgctggcatgagcacctagcatggggcctggcgcatcagaaaagctctagaagcgaccttgccatccgcccactctgcaggtggccgaagcccttgggtggaaggttccagggagagtagtgctggcagccctgattcaggtgtgtttggggaaagggaaaggtgagaccttcaatgtgggagcccctaaggcctgcagaaaaatgagactcttaaagctgctcctcccacagcgggagggtacctccacccaccaggcttccggcttctcagcgtggctgattcctggtgcactgtcagcctttatgggtcccattagggcaagagagtaagaggttttatgggagtttttcccccctctgtcttaaaaaaaaagaaaactagagttttcctgcgaattaaacaaatgtcaaatcagctttggctgcctgaatggcagcctttcagaggcagtgcctgaggctaactcagggaaatggggttcctgctctctgggcctcccagcaaagcccacctggtttttgttctgctctttgaacagagggctgaggagggatgctggtctttgttttcctcccacagtcaggactggaggagatcctagccaggagtgcagaggcaggggtctggggaccctctccccaccaggaagatcttcaggggttctgggagtccctggcattacaggcagcatcacaaatatgcatggaaagtgaaattggaaggggtaaatctgtagctttgttctgattctcaaagaggtcagtgaccttcaaaaagattaagaactcatgagaggctgggcatggtggctcatgcctgtaatcctagcactttgggaggctgaggcaggcaaatcacttgaggccaggagtttgagaccagcctgggcaacatactgagatcccatccctacaaaaaatacaaaaaggtgtggtggcatgcgcctgtagttccagctattcaggaggctgagtgggaggatcacttgagcctggggagatggaagctgtagtgagccggatcgtgccactgcactctagcctggtgacagagtgagaccttgtcacaaacaaacaagcaaaactcatgagaactattacagcacccacattttggacaagaagaacttggtccaggggctgggtgtggtggctcacgtctgtaatcccagcactttgggaggccgaggcaggtagatcacttgaggtcaggagtttgagaccagcctggccaatatggtgaaacctcatctctagtaaaaatacaaaaattagccaggctttgtggtgcacgcctgtaatcccagctactggggaggctgaggcaggagcatcactggaactcgggaggtggcggttgcagtgagccgagattgcgccactgcactccagcctgggcaacagagcgagactccatctcaaacgaaaacaaaaacaaaccccaaaagaaccttgtccaggaaggtctacacagggcaagtgacttgatgattcaattcacatagcacattagtggctgtttgtttaaagatcaggtccctctgtttaaggcggggtgtgggggggcgcaaaattgaggaggggaggctttttctcatttgcaagcagcttgtctcataattgactggtttttttttggttctgttgttgttgtgtgtgtggtttttttttttttttttttaagttggaatcactcccagaagtaaaggggctgagatgagcaaaataaataaggaataagtaggctcaacgtgtgggggaagtataaaatacaaagtgactgagtttggggtgaaaatgactcagagctgaatgggaacagaagtgagctgtgccctctgtgttcctggtccaggctgaatgagaggaagagagcagcatgaaggataaagaagctgggtgagcttcttatatagttttctggtacagtgggctaagcggcttctttttaaatggggaaccctaggctatcagtgacccctgactcctacaggtctggaggattgaaatggaaccctcaccttctgagccattgatcctctctctttgattttgccagagtccctctccccagctcagtcccagccaggtaccccggggctgccttccccgggctctcatcctcctctttcatccagcggctccttacagtatagttcaggaagcccctgggagccagctccgtagattgccccctctttcttcttggttgcttttgacaagctgtggaggccccccttctagtttctctaaaatgataaaaaggttgaaaacatctttttgctattctcaactgattgagtttttgttcctggagccaatctccatttagtggacaaacagagccctataggaattgattaccatcctgctggctccccaggggactgttcagggagtgccagcccctctctgggaatgggtgggtagccatatgaggacccacctgaagaggaaggaaggaattggcctggcagcttctagaaattccctcaggctcacctcatttcaatccttttggacaggcattgataacccattttgcagatgagtaaaccaaggcacagagaagtaaaagagcatgctccagtgttgacagaggaggctctgaacacagaactggctgagcccgaagcccatagttccgattgaaggcctatctgggtatgagggtatctgtctcgccttagttttctggctgcattttcgttagtatcttcttcttattagcatttgaaacagagtctcgctctgtcgtccaggctggagtgcagtggtgcagtcatagctcactgcagccttggactcctgggctcaggcaatcctcccgtctcagcctccccagtagctgagactgcagatgtgcaccaccaggcctggctaatttttttatgttttgtagagataaggtctcactatgttgcctaggttggtctcgaactcctggcctcaaacagtcttcctgccgcagcctcccaaagtgttgggattacaggcatgagccaccatacccggccagtgtcttattaatattagagtgctagatctgacgatacaggcctgaaggtaggagagaaggaggaaggtggcagagggatgatcttctgatggggaatctccagagctgaggtcacaaatggggagactgagtcccactggcagataggtcatgtgcagacatgctgctgttttgtttggcttggcaatgactttgaatgcctgtgggtagggcaggcattttcccatgggccacaggcccacctctccctgaggccacacacctgccaggctacacttactttattggcttggtcggctcgagagtgtgaatctgcacatctctccctgattctgccttcagtgacatcaggctggcagcttgaaattggccatcttgggtgtattccaccatagaagtcagcaaacactacaaatcagggctttttatttctgcagttcgttgtttattttttcagagccagtttacctgcacagtactgcctgtgggcattttctttcagccctcctttgaaaactctctccagtttgtactaggcatgatcatccaccttgctttatttaaatcagtctcatttacgcctcacgacaagcctgccctggaagatgtccctgaccccatcttgaaaataaagaaacacatgccgggcatagggcccagggcttgggttcaaagacaagtcctttgccttcaagcgtcataccccttgatggggcttaactccttggttttcatttggggggaaggtttggcaatatctgaggacatttttgttgccacaagtagagggggtgctactggcacgtggtgggtggaggtgggggaagctgctaacatcctacaatgcatagggcagccctgccacaaagaatgatctagcccctggccgggtgcggtggctcatgcctataaccccagcactttgggaggccgaggaaggcggatcacgaggtcaggagatcgagaccatcctggctaacacggtgaaaccccgtctctactaaaaatacaaaaaaaattagccaggcgtggtggcgggcacctgtagccccagctactcgggaggctgaggcaggagaatggcatgaacccaggaggcgaagcttgcagtgagccgagatcgcgccactgcactccagcctgggcgacagagcgagactccttctcaaaaaaaaaaaaaaaaaaaaaaaaaagaatgatctgccccccttcgtttggaagctactaacattctacagtgcacagggcagccctgccacaaagaatgatctggccccagatgccagaggtgccgaggtgtggggagccctctgttagcaggtggtaccccctgggcatcgcattgcttttcctatctcaggaaggcatgaactaaataaaggtaacactcatcttggtcaggaatggggaagcaccgtttggacaaagctaactatgctaccaaggtggctttccagatgggctggccggcaggtttaagacctcactgggcttgtgcccagacctgggaagttaaagtcagataggagagggtcacagtcatcgcccagcagtgggaactgtgacctgaagacaaatacagacaggggaggatttcatgagaaaagagaacatgggagtggtgagaaacagcagaagccctgtcccaggaaggggccagccagcccctgttagcgataagccagagctggagaaaacagaatcaagatccagatagatttacagggctgcattggtggttcccaaatctgcctctttgtcagagtcatccagagagctttaataagagaaaacaatgtgtatggccagaccttgcctcagacttacttggaatggccagaagtggggcctggaagtctgatatatatatgtatttgagacagggtctcactctgttgcccaggccagagtgcagtggtatgatcatggctcactacagcctctaccttttggctttaagaaattatcctgtctcagcctcccgagtagccgggaccactggtgtgcaccaccgtacctgcctaatttttaatgttgcccaggctggtcttgaactcctgggctcaagcaacctcccgccttgacctcccaaagtattgagattacagacgtgagccagtgcgcacagcacagccaagtctgaattttaaaaaactttccaagtgatactgatgactggccaagttagggacccctgggaaagatgaacgtgttacttgtcagtgatggctgttaaatatcaaaacgagtatttgagggaggctaggcaccagcatcactcatgcaataaagtgtttgaagacttgacactgctctgcccttacaacagtaggtgggccagtctcctgccctctccaagtgtacagaatagaattaggcacaggggacaaaatctctctgagcctcattttcctcatcagttaaataagacaaatactacttacagcatggggtctttgcgaggatgacatcaagaagcagtgtgacagccatcagcaagttcccagcttagcgtctgagtggggtgggtcctctgtagctgttgtccatggcttttgctgcaagagcttcctctttcagtccaaattctacatgggttgtggttctaccttgtgtcagggacattccaggccctggaggatattgaagtgagggaggccttgttttcatcctcagagagcttacagcatagcagggaggtagatgtgtaaaaccccctgcccttcagccacgctgggcacagagcgtggagaggtggcacaagcttgccgtgggcctggtgcaagagggatcatgggtcagggaagctgcttaaatggaattccaaaggaagttacagggttttggtaggatggagaaagttctttagttgtgccaggtcaatgaggctggtgggcagcagggaaagaccgcacaggcggtggctggggagagggtgtacctggggtctctatgccttttctaataggcttcttgttcttgccctctttttctctctttcctcccatctcccttcctgagaaatgatacccttcaggtgcagacacttgaaaaagttcatctgcttggtgcttgatttatcattcaaaccttcagtaactgatttccagtctcataaaatattaaatacgtccatttattgaatatcgcattttgatatgttttgacgcctcatttgccactgaagtcaaggacagattcacgtttttcatggcatggggcccagatttgtcctcgtacagtgttgtattaaatcccctccccacgcccctcctctgcagacccacgctcctcagcgtctcacttgagcagccaccctgacggcccagttggcatggaccatggcaggcccagggcagaatggccacatgtatcatccccagggagagttatttacatagcgctgtaaacatttgtggaaggaaagacaaggtctctgccagacatctctagattccgcatcagacagtggccaagccaggggtagagcccgaggggagaaactgtgtcctcccacaggcctgtgagcacactcattccgtccattcatctgctcatgctggcaactgaggtttaagaagcacctactaagtgttagatactgagctaggccctggggattttacgatggaaagctgttgtgcatgagagtgccgcaggtgttgggggagaagtgtgtcgttaggagctgtgagcatggagaggagggcatgcagttctcccacggaggtgactgggagtgatggggccgtggaaagactttagagaaggaacagcccttgagctcaggcttcagctaagaatgagtttgcagatggccgaggaggataagggcgttccagtcagggcgtgctgctggagcagtggcatggaggggaatctgcatgttttgaggctgggtgctattctgtatggctggggatggagggttccggaggggcctggtaggagtttagggtggccaggaggtaagagcaggtcacagagggcttagaagccacaaaggtgatggaatttgggtggtctcctggagatggcaagggaatgccacaattcattggatgagaggatggtttggagcagggcaagaccagaggcaaggatgccagttgggaggctcggctcagtggtccaggtgagaaatgaggaggaggaggaggacaggcttcggggagacattcaggaagtggactgcatggtggtgaccggttcagtattggtgggcccttaggctgggtttccccaaaagtacaccctgagaaaatgacttgtattgtaacgggtttggttgaggggcgatcatgggaatcagcaatggcacagtgaggcagggaggggcacctgtgtttagcaccacagcacgttggtgtgcaggaggccgggagaaggccttcatgaagagagcccaggtgcttgcagcttggggaaggggctggggcagggccctgtgggcatctgcacggtgggtgaggggagggaggagtcaagtctgattcccaggaccacacgttgggtggaaatgccattcagatagaaagaatttgggggagtggccatttgggggcagaaaggggatgacaaattcagctttgccatgttgagtttggggtgcctgtaagctggccacatggaagcacccagcaggaagttgattgatggggtgtggaatccaggagaggggtgtgggcgtgagacacagatttgggctttatttgggtagagatgcagccaaagccacgggcccagattgtgtcacttatagtcacttaagaagagcagagagcagatgagagaggaaagagctgggaaacacaggaatttatagaacaatctggggaagaaagcctggcaagtcaactgaggagcaactggagaaggtggagggaaaaacgagggcaggtgagaccctggattccagggggtggttgccagttggaagagattggaaaagacagtggctgccgagaggagtcaaatcaggtgagggtggaaaagctttcgctgggcaatgaggaggtcatggggcttttgcagggaatgttttcagtcgtgtggtaaggagcagaagccagagaggcagctgtacgaggtttttgagcaaggaagtgtcaaggtcaaagtggcattttagaagatgattctggaaaaggtgtgtaaggtcagagataggagaggctgaggtcaggaggccagcaatgaggctgctgcaggcttccagccagctgggagtgcagcagtgagcttagagaatgtgggaggcttgcttgagtccaggagtttgagaccagcctggacaatgcagtgagaccccatctatacaaaaagtataggaagaaaaggagaaatctgggaggcggagtgcaaggaatacttgctaagactcaaaatcactaggctaagaggacacatttacaaaggctcttggggccagccccactggccacactctgtgtgtgtgtgcacgcatgtgtatttttcagggctaaatgctgtcatcagtaacacagtctctgcccctacccatactgagaggtgaccttggttgtgatcctcacccctctagggctttttcctcattgtggaggaagcagtgaccccccttctaagttgtgagactcacaagaatgatgcctttcaaagcactgtgtaggttgtgatgaagcatatgggtttttaactacggtgcaaacaactgtcagggcttgtgtctctgcagggcccagaaggtgccccagaagctgaccctgctacctcctgccctgctcctctgcccccagccccacccttctggaagcgcctgtgtctcctgaccttggatgctccttcttcaaggtggataggcctggctggctggcggcctgtggatacaaaagtgacctgccagcaggagcctttttttctttcctcttccattcagagctagtctgcaacccactggcagggagagtgttgaatctgatttgctgaaatacaatagcagattgattttgtagccaccagtgcctgtaacaaattccaagtgaagtttggattgcacaattgtggggtaatgacattttaattgcatgtcatatttagtctggctcaatctgaagcctggggtggaggcccaaccctgcgtgctcccagcgcctcccctcctgcttcagttgggcctgtttggtccctctcagagttttctctctttcccccagcccctcccacctcggggatctgggtgcaggcaggtgggggtgaagtcgaagacagttctgggcttgcatctgtttcagacttttttttttttagagctgtttgtttttgccatcttgccgtgttgcccagggtgacctcaaactcctgggctcctctgatcttcctgcctcagcctcccaagtagctgggaccatggtcatgtgcctccactcctggctgtttgagacattttccccctttcccctttcccaaaggtagctttccctacctttgtttttccctctctgctttcccttttcccccatctttgcagttgcttttttttttttttttttttttttttttgagacagagttttgctctgttgcccaggctggaggtctcggttcactgcaacctccgcctcccaggttccagcaattctcctgcctcagcctcctgagtagctgggactacaggtgcgtgccacctgcctggctaatttttgtatttttagtacagatgcggtttcaccatgttggccaggctggtctcgaactcctgacctcaggtgatccatctgcctcggcctcccaaattgctgggattacaggcatgagccatacgcccagcctgcacatcttaatggacctgccttctacccctttctccttctactgctttttctttcctcttctacacttggttttcctgtccctcctttcctcggctctctccactaacctgctgtgtgatcttggacatgtcacttcccctctccgagccccagtcctctcatttatgaaatgcagggcttagactgattggtctctgtgagcctttgatatgcatgggattcctccttgtgtgcatccctccttccctccccatctgccttctcctgtctctcgcttcttggtttcgctttgtttttatggcgatgctcggagcaggagtctctcattccacaatacaggtggaggcctggactgcctattatgatccgtgagccttccacaggagagtgactcagtgaggagctgatttgctcccttcccccagaacagccaagtaattgaagaaaacatgaatgttaatgatgcatttagcgtttggaagttagaggggtgattaatatgttgtaagttgtatattaacaccttcacagtggcataatgaagacaaaatatacactcagagatgagattgtttattcttgtgtgcagcactcctggatgccaaccccctaagcctcggaacacgtggcatggctgtgtgttgctgggagagggtggccgcagggatggtgtctggcttcgtggtttctgctgatgagctctctcacctgtcctggggctggcccaggcagccggagtggagggtggagagcacagtgggctgggggcttggagtctgtgagagaccagatggtaggggacactgtcattcaggagtggcatgcccagaagacagtgcagcatgttctttgtggtctgcggagctcactctaagttttcaaaggaacgacaggataggagaagtgaagggaggatgcaggaaataggaaatgcctgcagtgtcttgagcttcaggaactctgggatttgcccattctgccctagggaggtccccctccccagcaaggggattcttgctacaggttatgcctagtgagtcacaagcctgggtgcaagcaaaacatgttgattggaaactctctgaccaggttctgtattggtgctcaggccttttacatgagaaccacagagtctcagaatgtcagcgcaggaagagccttgaaagaacgtccggcccatgtcctgtcgttttcaacaggaaaccaaggcccagtgagcggacaagactttgatttggattgacagctcgaggcagaaccaggagagggtcagctcaccttcgttcagcccctgggactctagattggggtgcagagatctagggactctggcccctcgatgactcccttggcccatttgtccaggaggccacataggaactccacccagtagctccaaagtgtggaatagcggataggatgtagagagatttgaatcctagctctgctgattactggatgtgtggctgtgagaaagtggtttcatctcttcgggccttagtatctccatctgtcaaagaggaacaataatatttaatatgcagtataattgtaaggatcacttgcatcctgaacacacacactaaaaaatgattagcattaacgtgtgcgtgtctgcatgcatgcacgtgtgtgtgtgaaataccaagtacagtttctggcaaaagacaaggaaggcgctcaaaaaatggtgataatggtgtatcataattgttactgttatcatcatgatttgctttcacggctgcagcctgcacacccagctctcatctgttcttcaagattcattttagtcacccttcctccgtgcataatccctcactgcccactaccccagtctcagttcagcacactcctgtgtgtggtataacccttcatccatctcttgttggtggagtttgcttgtctctctcccccatctgcctataagctcggtgggggcggagactgtgcctcctcccttcccccgcagcatcagtgttcctgaaatgttcattggacggatgagtgctctaattccaggcctggtgcgccccacctgggatgaagccagtgcgtgtgaacctgctagcttctgatttcttaagatgaatcctgagttcttttgtgcagtgcagggagtgctgtgcttttgggttgagggcaccccctcctagggatagaaagttggtgaccccttacctccttgcagggccgattgtaacttaggtcctgctgcttccacaaagccttccctagtaattccatcttttctgtaccgctcctgtaatacttaattcattcttctcctgacatgcttgtcatactttaccttgtcctgtatcacttacttatgtgatgtatctcctttgcgatacacctcgtatctatccctgtgggacaactcgtccgcccgtgaaccaccatgggtccatctatagtagactttaccattggtagagtttaaatggcactttgttgaatgaatgaatgataaatttcctactatatttgtagtgtggaagcctgttcagctgttatctcattgtaatgctagtttttctcattatccattctacattccgtgagagcaaggattttactaaatacttctgtgtcctcataatactgggcagataatttaatgggtaattaattactgattgatttccttaaattttctatcctattaagacttttgaggcaaaaaaaaaaaaaatcttattagccttgttaaggggtgccaacatttgaaagaattgactaagcctgagtccctatgatgaaacgtatagcatgtgggattccccatgacaggtggaaatccaaagggtttttctgatcatttcctgaaagccactgatgacttcactgaaggcaaaagatctcagttaaagggaattattagacttgacactagaagttgtcagtgtagccctcattatcgggctactttgtggtggatgggaactggctttggggctttgtctgtgacaggagagtgctccctgctgactctgggtgggtcagacagaggccataccagagctctgagcttccaccgtgtgtagagccctgagcggggcagggaacacagggacaaagaggagtgaggtaggtaggggaggagggtcatgggcacatggtgcaaacccgagtgtgtgtgtgagaaaaaagcatttctaatcagtgaccctcgtattaagcagggttctgtgtgtgagtggtggggttgctgggataaagagccatttgaggctggagggctggtctctgccattggggtcttggctggtgagaatgaggatgattactcatatccatgtgtcgttgtgactcagagagctcgggttctggagttggagagaccaaagttcacagctgagcccagctgctgcttagctgattggccttgggtaagttcctcacactttctgtttcttcttctcttgtgtggggtatcataataactgcttcctgtttctctgtgtcttgtacaagaagacatgcccccacagtgggactagcactcaggtcttgtcaattcttgtcctgtgctttctatacccttcagccaagggaaggggggctgtctgcttaattagctgatgttgataagagctttggagatacaaagctcttgataagagctaatccccttaatctgtgtggggctgatgtgtgcatgtgttgtacaaggcaaatagcactggggggattgaccaggaatgcagggcagcacacggagtgtgcatgtgtttgcgtgtgtgcatgtgtacacattgttcttgctcccttgaaaggtgctgcagacatgatgtgcagggattcatgcctcagatggagcttggaggagatgccctccgtgtttttccatccccaaaatgctgtgattctatccttgattggaaggtggctccaggtcctggggcagggaagctcctgagctctgcaggagcgtctgtgtggtccaagggaaggatttaagagcccagagtcaggtgtggggtgagctttctgcacactgccctgctcactgtctcagggtgctgaggcatttaaaaattgtcctgataatccttctggcaaagttgccagccctactatagcctagaaaagaggaatctgtgaactcaaagacatgctgttctgttttgactcagcaatgggcaatctgttttctcccaggagtttggtcttaaccttaggttatcaattggttcaccctgccctctgttccctcccctctgcatatgtaagctcagcctgcatcctctctcgcttccttctgtgaaccttccctgcaggcagtgatggggacaggccctcagtgcagtgcctggcctgccccccatgtaggcgtggctcccccagaaacagaccccaagtgaagacagaagtaagtgcaagtggttatgtggttggtggtcctgggaaccacacagaaagggggttatggttttttaaaagtgcactcatttgcctgatagaagagtggagaagtgagacagggaagggaaagaagaccataaaactgtggccacccggggcccaatcccactggggcacagtgggagagtatggccactagctagggtctagcacttggggcctgtcccatgtgcatgggctgcatgagctccagagaccagaaagttcttggatgagacagaggtgcctgcatctggaggcccccggatcagcgagtgtgagagaagtggacatggccccacagctgctcctggccaatctgaactactgcatcctagacccaggcttggccattgcagtgaagacatctcctgtggctgtaaccccactcagatgtacatgccagctaccctacggttctaggagcatttttgcaatttttatttcttggaagacactggcagtgatctgatttattaaaactgtaagttggctgggcgcggtggctcacgtctgtaatcccagcactttgggaggccaaggcgggtggatcatgaggtcaggagatcgagaccatcctggctaacatggtgaaaccccgtctctactaacaatacaaaaaattatccgggtgtggtggcgggcgcttgtagtcccagctactcgggaggctgaggcaggagaatggtgtgaacccaggaggcggagcttgcagtgagctgagatcgcgccactgcactccagcctgggcaacaaagcaagactcaatctcaaaacaaaacaaaacaaaaaacaaaacaaacaaacaaacaaaaaccgtaagcaaatatgcattcatcgtgggtttcgtttgtgtcaggcaccatgctaggtgctttttctgtgtatctcatcttggtccttttgatatcccatgaagcaggtgttgttattcttgtttgctatttgaggcaactgaggcagagagtggttaagtgagtttatgcagcttgtaggaggccgattgaggccctgaacctagtaccataccatctttcctggctgcgctcaccatctgagagcttggttctgccaaatggcacttcacaaagcattgagcgggttgggtgggctacttctgtgggcctcctgtgtatagacaccaaaaataagattcaatccaactaaaagcctgttaattatgccccaaaaatatggattgaagggtacctgggccttgatggatggaagctgcctttaagtcagactctgaggaatgtcgtagcccctcaccctttgatgaatttgtgtctgcctggcagggcctggcagctgcccgggctctggctctcttctctattccaggaagcccagccatgccagctctggcttgtcactctttttgtcccagggagcccctagagacctctcagtaatgcattctacctactgggcttggctggcactcttcctgcccctagggcctggtaagtgactttgccatcaggctttgtgattgcagcttgtgggtggggatccccaggatcctctttaactgggtgctcagttttcattttaatctgacaactgaagagctctggagtaggagccaggagatcttgatttcagtctcactcattgcttatgtgtccccctacttctcttctctgggcctagcgtcctcatctgctaagtgatgggatctagtatcccttccaggcctgaaatcccaggagttggggagaagcaggaattgggttacaaagagggcagagggttaccagctgatttcagaggtttgtctcctccaggacccagctgtctgctggctgacaggtcaagcacccgggatccattacattagatcaatctaagagaccttggattctgccagtcctaggcacttcataaaatccctggccttacatctttgttggggtggggatggggcagagggaagaacttgggaattggtgcatggtggggatggggaagagggctgtggactgacccatatttgagccacggagtctgggccagccccaggagcagaggggcctgtagaatgggccatgatggattgtgaccactcagcttgtgggtcaataatccctttactaagagatccgcaggtgcaccttagctggagctcagtcataaaggcagcagtggagaatggagctttcataaggggtcctgaggaagcgcctgttagattgctctttcaaattggccgtgacagacatgttccttagggagccattatcttcagacggaagctggatactttggtctggaagatttgaccctaggctattcagccaggatggatggaataggaagttggccctacaatgcctcatggccaaagtgctttggccatggtggccaggaagggatacagaatgttgagaggggagcagagggactggagatggtcatgcacaaggcaccagacccctccaaaggtgtcggaaaaccaaagatcagcacatgaaactacgtcaagaccttgagggagcacacagatttcagatatgggagtgggctgctcagattttacaagataacccttttgtctcaggcaatgaaccagtcagctttccttgcaccaaacaagcttataatacactacagttacctgtacaagtgattccagtgccccctgtgcatcaagcagtttttattgggcttttgccctggggttccttgaagttgccactgctaaaggggacttttttaagaggcttaaaagcctctgctagaatgatcaaagagggttccaggatggcagtggacaggtgtgactggagcaaaaagttcacttaggacaggggttctcctggggaaccttctcgggagccccgtgaatgttggcaaagtgttacgtgtaagtagtgatgtgtgtttctctgggcaagagcgtaaaaccttcagccagagtctcaaaatggtcttttgtctcgcaagaggttacggttaagaaccgcagtcagctctatacagcagggctatgtctgctttgctttccattgttttcttagtacctagcttaggtacctggcacttagtaggtggttaataaataatggttggatgaacagctgactaagaagattaatagttcatgactgggaaaagcttttttattttattttattttattttatcttatttatttatttatttattgaggcaggatctaactctgttgcccaggcttgagtgcaatggcacgatctcagctcactgcagcctcagcctcgcaggcccaagtgatcctcccatctcagcctcctgaggagctaagaccatagacatgtgccactacacctggctaatttcgaaattttttgtacagacagtgatatcatttggatcagtggggcctggttgtaggtgattggatcatagaggtggatttccctcttcgtgctgttcttgtgatagtcaatgagttcttgtgagatctggtcatttaaaagtgtgtagcacctcccccactcttcctcctgctccggctgtgtgaagtgctcactcctcctttgcctttggccatgattgtaagttttctgaggcctccccagaagcagatgctgctgtgctttctgtacagcttgcagaattgtgagccagtaacatctcttttcatcataaattacccagtctcaaatatttctttatagcaacgtgagaatggaataataatgaaaattggtatcgggagtggggtattgctataaagatacctgaaaatgtggaagcaactttggaactgggtaataggcagaggctgagagagtatggagggctcagcagaaggcaggaagatttggaatttcctagagactttttgaatggttgtgacccaaatgcagatagtgatatgaacagagatagccaggctctggatgtgtccagatggagatgagaaacttattggaaactggagtaaaaggtcacttttactatgtcttagcaaagagcctggcttcctagtgtccctgttctagggatttgtagaactttgatcttgagagtgatgatttagggtatctggtggaagaaatttcgaagtagcaaagcattaaagatgttacctgactgcttctaattcctatgctcatatgtatgggcaaataaatgacttaaagctggaacttatatttaaaagaggagaagagcatgaaactggaaagtttgcagcctggtcgtgtggtacaaaagaaaagcccatttttaggggaggaattcaagcaggctgtacaaatttgcataagtaaaaaggggccaagtgctaatagccaagacagtagggaaaaggccttgaggcatttcagagaccattgtggcagcttgtcccatcgtaggcccagaggcctaggaggacataatggtgtcgtgggccaggcccagggccctgctgccttgcacagcatcaggacactgttccatacagcccacactccagctccagccgaggctcaaaggggcccaggtacagcgtgggccacagtttcagagggtacaagtcataagccttggtggtttccatgtggtgctaagctggcaggtgcacagagtgcaagagttgaggcttgggaacctctgtctagattttggaggatgtatggaaaagcctattggtctagggagaagcttgctgcagggttggagccctcatggagaacctctacgagggcagcagtgcaaaggggaagtatggggttggagcctccacatggggcactgcctagtggagctgtgagaagagggtcaccatcctccacaccccagaatggtagatccaccagcagcttgtatcttgtgcctggaaaagctgcaggcactcaacgccagcccttgaaatccactgtgggggctgaaccctgcagagccacaagaggagagctgcttaaggccttgggagcccaccccttgcactagtatgccctggatgtgagaaatggagttaaaggagattattttggagatttaagatttaatgactgccctgctgggttttgtacttgcatgggagctatagtccctttcttttggcttatttctcccttttggaatgggagtttttacccaatgcctatacccccattgcatcttggaagtaactaacttgtttttgattttacaggctcataggcagaagagacttcctttatctcaaatgagactttggacttttgagttaatgctggaatgagttaagactttcggggactgtttggaaggcatgattatattttccaatgtaagaaggacatgagatttaagaggggccaggggtgaaatgatgtgatttgaagctgtgtgtccacccaaagctcatgtggaattgtaatacccggtgttggagggggatcctggtgggaggtgattggattgtggaggtggatttccctgttggtgccgttcttgtgacagtgagtgagttcccatgagatctggttgtttaaaagtgtgtggcacctcccctactcttcctcttgctatggccatgtgaagtgcttgctcctcctttgcctttggccatgattgtaagtttcctgaggcctccctagaagcagatgctactgtgcttcctgtacagcctgcagaactgtaagctaattaaatctcttttcatcataaattacccagtctctgctatttctttttttttttttaatactgaaaagagttaacagtgtattataatttattttatttgacaatctaggaagttcgcagccaccagcagttctagtgcagtttcagtgtaattgggagtttgggaatctcggtggagctgttagcgtagtgaacctgtgtgtaaaatacgtgcatacttttgatagcacatgtgaaggtacctctctaaaactggcctcattggtttcgttctcagcaaaattgacctgggccactcaacatggctttatcatgcctgatgttaatgcatgttctctttttacaataaattcatgaccatcagatgatatcaatttgacatacatggcatcagggccttcacagccaccctaataggttttctcctcgccatccattttgttcttatgaaattctactttgcttcctcaggaactttagtagtttcccagagttctttttctgccccagctcgagactcacttgtctcgagccaccacagcctagtccccatgtactgccccgtagctaccataacccagtccccatgtatggccacagcccctattccagggccactcccccaccctcagctgcctccctgtcctcaggtatttctttatagcaatacgagcacagactaatacagatggggtctccctatgttgttcaggctggtctcaaactcctgggctcaagggatcctcctgccttggcctcccaaagtgctgggattacaggcacgaaccactacacctggccccggaaagcttttaatgtagctgttcatagccttgtggaaaagttctggtttaattttttaaataaatatttattagtattttgctccaatcacgtcaggtattgtagtattattactagtactgctaccacccccactgtcactattatttccccactgacaactatcagacactacttattgggcatgcacgatgtgccgggcattgtgctcaaccctttgcaatacgatctcattcaatccttacaaccatccagtgaagtagatatcattacccgcctcttactgttgaggctcggagagcagttaagtcacttgcccacgatcatgcagcaacaaagtggaaatgccctaattctaacccaagtcagcctgactccaaaacctatatcctcagccattatttaatcttcggggatgggtggttcagtgctgagaacaaagactcgtgtaccctggtcacagcttgtcacacacaaaccccaagctcaaagcctctgtgaagtaagaaaggaacacgttcatgctgagtcttgggtaaggtcaggaaggctgcttggggtgggcacggtgagtctgcagggtcggtggatgatcttgacaaccttctccttagttaagcctttcacacagtccattttctccaatcagctgagtgtttgaaggcctgcaaggccccctgctagagaagatcagggaatcaggcacttggagctgtcagggagaaatatctaaatcatttgaacaggtaataataggatagtgtaagcttgtttagtgcaaggaaactcgttgtaacagaaaccccctcccagctcatcaacttgcagctaagggattttctgtgaggtagacacaaagaagacttccccagagccctggcagtgaggcaagggagggtctgggccatcaggagccagaaagagtgaaggtcctggcatcctcaggggcttatgaaagactatgggagttgggttagtgtgctttcaccttagactgggagttccaagatggagtctagtcttatctcaagcatgtactaactatgtaaacttgccaagtcacagttctttgggccttattttcttcctttctaaagtgaaggcacttaattgcatgattttagtcagttttgacatactgtcatccgtagagacttctcagctgcagcggcagtacaagggggtctttgtaatgattaacatgggtatggggtatagcttgtgcttgtctttatatatgtcatttattattattattattgttttaatttttgtttttttgagacagagtctcactctgtcgcccaagctggagtccggtggtgcaatctcagctcattgcaacctccacctcctgggttcaagcgattctcctgcctcagcctcccgagtagctgtgactacaggcccccgccaccacacccagttaatttttgtatttttagtagagacggagttttgccatgttggccaggctgatctcaaactcctgacctcaggtgatccacccacctcggcctcccaaagtgctgggattacaggcgtgaagcaccgcccccggccttattattatttttaactgtgacaaatgtgcaaccaccaccaacactgggatgtggtacatttaattttcacaacaaccccatgaactaggtactattactacccccatttttcagacacagacaggaggcttagagagggtaagtgacttgccccaggtcacactgcctttagggggcagaagtgagacacttatctgggtagtttgacttcaaagccatgcctttaaccactgggcagacttttctcatgtttttgagcaagactcacagcaagaaatacttttccaagcctaaccctgattgtccacagatatatgcatatcaaatggaaatactttgtactgcatgccctgatagttcttattttctttgcttttggctttctcttttgggagtgtcattattgtattagtttcctgtggctgtggtaacaaatgaccggaagccaagtggcttaaaacagcagacatttattctttcacaattctggaggccagaagtctgcaatcaagttgtcagcagggctgtgctcccgccaaaggccctagggagaatgcgttctgtgcctcttgcagcatctggtggctttagctggtctttgctgcagtctctgcctctgtggtcacgctgccccctcctcttctctgtgtgtctgtcctacggatacatgtggtttacttagggcccccctgataacccagtgtgctcctcctctcaagatcctttgacttaatcacatcttttgccatgcaaggtaacatccagaggttctgggagttaggtcatgtgggtcgccttttaacccactacatttatggacttgtgaatttttacagattcagtgtatttcagtcagttctcctaactattctttttgcatctcaaattgtcccatctttggcctgtgggaaccccttggagccagcccctgtactcttttaaattttattttatttttcagacagggtcttgctctgttgcccaggctggagtgcagtggtgtgatcatagctcactgcaccctcattctcctgggctcaggtgatcctccccgctcagcctccaagtagctggggctacactcagctaattttttatttttatttttttgtagagtatgggatcttgttatgtttgccaggctggtcttggcctcctgggctcaagtgatcctcccaccttggactcccaaagtactgggattacaggtgtgaaccaccgcacccggccccctgtactctttaggtgtgaccccatcggtctgtgaacaagcccatgctctctgacacaagatgtcacaggcttgtgtgttcctgacccccaaccaggaattcctccaagtcaccctgatttctttcagtaggaaatgacatttctgttattttccattctcttctatttcattaaagaaaaacactgattacaatctactaaattgatttcacggacctacttatgggttgtgacccatagtttgaaaatcactgttctgggctattttgtctttctttactttcttcataaatttaggaaattcattcccatcagaaagtgaggtaccctcaaaggcagggtcacgtgttcatccactggctcctccatggcggcaggatggggtctgcacacatggggcctgcaccatgcagcctgcgtcccatccaggggccctcagagctcctgctgccctccgtggcaccctgcttctctctgggccctccccgttcctcctcctcctcctcttcccccttactcttcttcctcccccttccctcttcctcctccctctccctcttcctcctcccctttccgccctgcctctctccatcactgcctggacttcattttgccattctaagaggctaatgtgaaaattgctcacagatggcataaacaatatggaaaagagcctctctcttcattagagtaacacaagatagtgtttttaagtgattaaactgttatagcaataattatgttgaaatctaaacatctcatcacactactttaacctctcaccaagggctcttgaggtccccttggggtttggcaggggccaccccaatagagagctcaagagcggactgtctaggccttgctggaccttccccatggggccccatggggcagaaatatctgagtagtgttgggacctccattggtgccccctccctgtaaccagatgtagaggtcctggccccaaagctaggctctagctgaatttttctttggtggctatcccatcccctttggcctcctccttgtcccatagccactctctactctgagtagctgtaggtgctcctagagggctgtcctgcttgcccctccttgctggccaccccttgttctctcagcaccctgcccagagtcagctggcaccgagggaagaaagtgggtgaagtcctctgcaagacacaattgcaagacagacacttcatctcgtaccctgccgcggagtctgggcattctctagagcaccttgggaattgctctcaacctgttcttcctcttcctccattagcgtagatcctcatttctttcttccagggctgtgaaacagctcccacctcaccttctgcccttcagcttctctccctgcctgctgctccaggaaaggaaagtatagaaagctacacagaaataaagacaccttcatgtatttgattatcttggggggatggggtgcagatttaagagatttaagagagacctagagaagatgaaacgcacctggtatgaaaattatagactagcaatcatgcgcctcattttaaataaacatgtaaaaataagacttaaggccgggcgcggtggctcacgcctgtaatctgagcactttgggaggctaaggtaggtggatcacttgaggccaggagttagaggccaacatggtaaaaccccgtctctactaaaactacaaaaattagccgggcatggtggcatgcacctgtagtcccagctactcgggaggctgaggcgggagaattgcttgaaccaggaggtggaggttgcagtgagccaagattgcaccactgcaccccagcctgggcgacagagtgacttaagtttcctatggtggttggtcaaggcagtaaggaaagagggaaagaaggaaaagagggaggtcagagcaaaggcagcggggaatggcagatgagcacccggccggaaaggggacacagagagaagaagcagaaaggagggagagcagagccgggggaggcggagagagaagggccatgatgtgaagcagcagctggccacctactcacaggccctcctgagcttcattttggtttagggattctaagtgttgttgcctcttctcacatctgagatgctgattagtcagctcttccgtggctctttctctggatctttctgtctctcctttcagtgggcatagctcatcttttcagtggaggaaacattttggtctgggtctcggtgggcagaagtcattgctggcttttgtgctcttcccttcttacccctggctccaaacagagtgccagggtgtggtggaaactccacgtgtttggggggagggtgggcagctggctgggtgaatcagaacttccaggtggcagcactgtgttagaggaaggactcatcagggtagagacagcggcagatggggtgtggggaggtgtcagtgatggccacccgtgccccacctcaggctctgatgaatggaggcttcccagtccctcttctattcagaatctacttctgataagggacctgaccaacatttgaagaaatataaaaggccaacttcatctgctgaggtaggattacatcaaggaggatgaaattaaaggcttttcatggaaagagatctccaggataatttgatggaagactttaattatttcagattcaaagtgtccccccgccccaacaaaagatgctttagaaaaaggattcattgatttggggagtcacataaaaatattatgtacatgtatctctttgagtccttagagctgctattagtctagagggctgtcagcagcccaggggagggggcttcagtgggccctgcccctttcctgtgtgctggtgacagatgacccaagtctctgccaccaagggaatggaagaaaggccagggaaggggaaaatgggtttaaatgatttagatgcgacctcagaaagaacttggaaccattttacctgctttaactggctcggcacactttattggagggaaactgatgcgcttccctacccttagacgagagagtggcatgtcttatgtgtgtggggaggtgaactcttcaagaggttgtgctgtctcaaagccgcacagggtggctctaggacccaggatcttttggccttacctttggtcccctgccacaccaacactgcttccagggtgcactcaagtctcaagctcaccttgatccgtgctttccccagggaacagtagtctcctaggcatcccggagctcattgcatctgttcctctgcctgaacgccccatttggatccaatctcaaggactccgcagctgctgtgcactcatcgctctggacacacgatgtctggaaaactctcttgctggacttctgtgctttctcccttgatcagggctcgtcaggaggatggcatactcacatatcaagggctttgtagggcaaacagatgaaaacaattgtcttatgatctaccctaaagaaacatggcttgatgtgattgacagaaagccagccctagtgatggtaaacactgatggtcagcacaccggttccttatgtgccaactgactccacggaggcccgaagggcttctccactgcccaaggccctgggcagaggccacgtagcaggcgggcctggccctgtttgtgctgatctgttcttgagagccccggtctgtgtgtctggggttgcacagctcagtgtccctctgtgtcaccagcccactttatctactgttgggtccccagggctcagcacagagtaggaatttcattaatgttggttgatgataaacattatggagcccaagttaatccagttcttccttcattcacaagaaattatcattctcgccatttacttacaaaactgattttagatgggaacctgcactttcccggtcctctccaaaggagaagccacacagcgcagtgcaaggagagcaccaggctaggagtggaaacctggcttctggtcccagccctgctttgcactggccctgtgaatgtgggcacttcccctccccagagtctctgcgtgcctctctgcatgtggcaggtggggttgtgctagctccttccagttctgatatttccctccccttccctgctcaaccctgtgcctcccagagcaacaccaggctgggaggtggaatgagcccggcagttcctggagacagtggtttcctggggcccaggaggcaggccctgctggggcaaaactgtcaacatggctgctgccccctccctgaagggcctaagggcaggatgagcttgtggcttggggccctggtgtagccctgctggacctctgcacgagggcctggctcagtcttgtgtggagtgcctgagccagataagcagagagggtccccaaagagctgctcccatctggctgcatcctccccttttccagcatgaaatcattcttcaagtcataacatatttcctgaggaataaaggtcaagacaaacttcagagtgaacttctgaactcatgtcacggtgctgctagcaatttgctgtgcttctaattcccctgagcctcagtttccttatctgtaaaatgggcctgagaatgctcactatgaagatggtgagaggcaatgtatatgaagctctttgaaaggcacaaagggctgtatgagtgtcagcctccggggagaggaggcagcctgtgccggggtgctaatgctctgctggtggcagagggtgtgctcccaggaggggtgttatccagatggctcaaatggggtgagaaactcggaggcttggtgagctgtgaggtagaggaggctgagtgcactctgtccctgtcacctggcccttcatctgacatctctggcccaggccacagattggagtgctattttcttctatgcttggaggaatcatcaattttgccccagaaatatatctttagccgtggtcccaggagcccccagccacccctggcactactccctacctcttagctgccctttcccttagcggaaacaaggatgtgactcttgacctgcttatttgtgttccctgggcctccctgaccaccagacacccatctgggtaaaaacacaccttggagattgtagatcccctgaagccaggagctgtgctcccgagggccctcctgacaacatgcgccttgtgcagagagggatagccatggaaaggttgatggtcatgatgacacaagggttagcagtgcctccctggggtcctggcctgtttcactgatgggtggaggaggagaagggacattagctcctaggggcctgaggaaggcaatttcttgggacccaggtgagtccagaggccatggctgtggtttcagctgtggggcagagggacttctccagtgagggtgagaaacctcatgctcagttctctgttttttcttataccgtgaaaaataaatgtgaagtaaagagggtttcagggcaagatacatccttcttccctccctcccttccttcctttttaaaatatttattaagcaagcagtacttgccttacgctgtgctaggacactcagagtggagaatgcgtctgctgccctcctaggaactcgcagtctagtcagggagatgaaatcaccaccgagcaaggcggcagaaggaggcacgcggccgctgatggagcggcacagccattcagacctgggtgagctttgggaagcctggtgtagccatggagggtgttgtggaggaggtggcccagagatgggcttcagaggatgggaagaagttggagaggtggggaaggtggagggaagcataattgagaacaaaactggtatagggcagtggttgatgatctgagtttgaatcctgtctataccatgaaatatccatgtggccttgacaatttcccttcctatgtgagcttcagtttcttcatttgaaaaatgaggacaataacagtatctatctcctaaggttgtttgagggttaaatgaaataaaatgtgaactacctagggccaaggttgttccgagtacacgcatattcagaacacattagctactgtcgttcctgccactgctggtacgactgcccgacttctgccttccagttgctgccactctgtcctcctgccctccgtgccttgaccctgctctgatgagaaggcacctgaatctctcctctgggccacatgggcacctggctatgtgctcaggcttctggccaatccctgtccccaagcagaggaagctagagcgcctccaccaggtgtgaattgaacccaacttccctcctgctcttttccgattgtcctgctaggcagaaagtttccctgccaggcccgctgttgtttgtattgacagcaccagccaccttttccttccagcggctccccatgctgggcggctggggagttggccttttgctaggagagggagctgtgatgccctcagaggcatctgcccaccccctcgggaatctgacattttgtctgcaccagggcaggggcctctctgctgacggggcctgtcccagctgtcctagtgctaatccagtttcattgcactggcagttgggctggcaaagctttggtgcaggatacccagcaccaaaataaaaggcacctggcatttgtgtgtgggggagagaggggcactgtggacaccactcaggaggcgtcccttcccagccagggtctaggagtccttctgagctccttctgcaagtaaagtggctggaagggtttcctctcttcctgcctagcccagcccagctgcaggctacagagtcatcctctgccttgccctgtgtggggaccctgaaccccctcttacctgtcagcctctggggcaagcagaaggccccatggcccagtgccagagctaagccccttgggagcagacaaaccaggcctcccgtgacctgctctttaactcagacaaaagactgcctgaccattttgtggtgtgtttctgaaagcagaaagaaacatgcttgaagaagagcagtgaataagaatctctttgggttgcacgtgctcctggcagcccactgggaagaggaggcagcccaggctctgcactatcaacagttctgctgatggttcttagcagcagccatctccagcctttcctgctctgccaggaaaaagtgaaatgcaaagaaaagcagacgccggcctcctcttttaagggtgttgggccgagctctgggtggctggaccccctctcaggagccaggtaagggggaactctcttgggagagggcttctgtgacagtccataaatccatattgttttgagcacaaatgaacaagtgatttaaaattatcgtagtctacttcaaaactactttttttgttccttttgtgcaacaccattggatgcggatgttggacagtgtgatgtgttggaaagttcgctaaccagggttctagagtcctgactgggttctagagtctgggtttctggagtccttgggcaaggcccctcccttgctggatctattttttcttctgtaaaatgagaaagtgtacctgggcgatctctgggttcttggagaagcactccagccgagcggttaagaatggtgggctgcacagtgctggtggtcctgggtctggctctatctctgtcatttacaagctgggtcatgtctctcagcctcagttctctcatatgagaatgggagtaatcatagtgcctgcctttcggggatattgtgagaatgaacagagatgcacacatagcactcagcacggtgtccggctgctacgcagcactcagtacaggtctgctgttttgtttgccttcattgtaatgatcattgtcgtcatttcattgtatctcctagttctgacagtgttggctctgcagctcaatggggattcccaagtgcttctcaagcatttattacttgaggatcttgtcagaaggcagatgctgaccctagggtctggggtgggacctgagtttcggcgtttctcatgagctccctggggatatggatgctgttgcccacaggccacactttgagtagccaggatgtgacgctactaaagcatcgatgcccagtgtaggtggttgtgtcatccagggccaggcctccgagtcgatgggagcctcttaaggtccaaggagagagtgacaagcctggtaaactcagcagcgtccccctccctctgcccccaggacagtaggcagcacaaaagtctcacccaggagtgagaggggacagaggcctttgggggcaatgaggtcaggagagtcttcccagctgatttcatgaaaggattttaaagatgactcttgccttgaactcctaattttctcataatttagggctgattattaggattgcctcatgggcttgtctctccaattatgctgaaaaccctttgaggacaaaggtcttgtctcaaattactgtttactccagagctcctacgacaccaccgctgggcttgtaggaggcacacaggttccatctgctccagagacccccagccttggagcttggtggggtggggatgagaacaccaacttggagtcaggtgatcccaggtttgaagtccagcatgatcatatactgttgagcagtcaggggcaagctccttaccccttccaagcttcctcatctggaaatgaatggcagtacccactgctgtggactgaatgtttgtgtccccttgaaattcgtgtgttgaatcctagcccccagtgtgatggtattaagaagtgagcctttgggaggtcataggcgtggaggcctcatgaatgggatgtgtgcccttgtataagagaccccagagagcttgctctctctttccaccatgtgaagatacaagaagctggccatctgcaacctggaagacagccttcaccagaacctgaccatgtcgcaccttgatctcagacctctagccttcagaacggtgagaaataaatttctatggtttataaaccacctcaaactacgacatccacctcatagatttataaggctgaattgagataatgagtaaagaacgtagctcagggtggggttctgcttccatgctccgtgtccccttctcctcctctctttcttctccttgtcctgtattgtcaggctggaccctgctcacttagaacccgagggtctcactgtgcttcccgtttccaggttagctccaggtatgagatatagaagtctaacacttgtccccgtttgtcccagccaccttcttcctgctcttgcagctccatttatcttgctgaaaacttggctcttccaggaatagcactcaactcacaccacccagcatgtcctgggaatgggtagaagagcacccccagaactgagggttcctgattctgaggatctcctgcaaccccttgcactaccaccagcatcccccagaggcttctgtgtgctcagagttgataagcccttctccaccactggggagactggagtgtgcttctctgctgtagaggaacacccagcttggggccattgacactatgaccttgttactagctcacgtcttaacccaccttggagttcacaggtcgtttcctttggccctcacaaataagccatgagatgggctggttctatcatcagccatttaacagatgaggaaacttagaaggcacatggttcacccaggcacacaaacagatgatggcaccttggtcatctgatcctaagttcagtgccctttgccttgggtggcagctgcccacagagccaccagcgccatgcagaagagtagagtcaaccaagaacattatatgttcagtgacagtgagttcagagtcttcttggcctggagcttcgtttaagatgaagtgccaatggcaaggtaattatcattttgggcatatttaaagtacttaaatggccatgtcaggctttcagagccctgtaaatcagagacacagtgagtgcagggccaggcctcataggactcccaggccttctcgatggggagcggagagagccatttcctgggataaagaggactctctgcagacgctggcccctcttaatcgctgcccatgccttgttctgtgcacgtgagcacatgtgtgtgctcgcatgcacctgctttgaaagcctttgacttagacattgtcaggacgttgctctgtgtctgaagctaggctgccatatctgctattgatggtgtttaattagggaccggggaagcttttaacttttattgtttattaataaagataaatttgaagcatcaaaagtgtactgagttggcttttttaagtaaagagggaaatgaaagccacaggtcccctcaaatgaaaggggatgggctgtgttagcattagaaggcccctgagcagggagaggctgggaggggaagggagagtttctctgtctccctgctgctactgtgggggtttgctggggagaaccaagcataggcagaagggaagtgtggctgggcatggagattttttgagataagggccctgcttgcggcacatctcccagtgggatgtgtgaaagacgattgcaaacctctgagctgatgcaaactgaagatctgtgagcacgggggtgggagaagggctcttggggagagagagcacagcgattagtaggacagaacttggaggtggccaaacgtaggttcaaatcctgttgtttccgcttatgagcagtgtaacgttagagcagcggctgcacctttctgaacctcatttctaaaatggggctctttagacctgccttccagtgtgtgtgcagattaagcacgataatatatgtaaagtgcttggcgtcctgcctgacaagttgtaagccgccgaataaatggcaagagggggcctctggtgccctgtgtttcctgacgcactctctctgtcactctagccttgttagagtgttagttgttgaacatgacagctaacgtgtgctgagaccctactcagtgccagggctatgcctgaagttctgcagcaaacaggaggcggagctggcattcaaacccagctttccccattccaaagcttctcccacaccaccccgccaccatcccgtggtgccatttcccaggttgaaagttctctgcttgtaacacagagttccctcctcccccaagggttctgcagcttctgccagggcctcgccttggcctttctggaaggagccctcccagacaccaaagactctcccagcctgccggcctgcctaccccagactcttcagagagactctgttcctctagggacccactcggaattgagtctgtcagacgggagacttgttgctctgtctggaaaccccagtgatctggagacagcagatttgggagctgaaaagagacagagaacggagtccggagacagtgggaggttccttgtgggagttctcaagagaccctcgtgggcaggagggggcgattcaccttgccagggcttcccttcctcctctctgccaatcttcgtgcccagctcacggagtcgccaagcatgtgacctgcctgctacttgacttgagcaggtggccagactgagcatccgccatctctagggaaagcgagatgcgaacgtcccccttgcacctcagttgagcttcgccttggcagctggggagcaaagcctgggagaagacagaccagggaggccagaggaccttgagcagctatggggcttgtttcttgccttctttccgttttccagacagaggagataggagggcagctgagtgtggcccaggattcccagctgaaacttcatattacggtccctgcaaagggtcgggttccttctctgcctgccatgaactcttgtcagagatcatcttgggttaggaaccaagcacatcccaccccaaccccttccccactcagaaggggacagatgtttgaataattcttggaaacatgctgcaaccacccaaggtgcactgagtcagctatgcaaattgagaggcgtaggtcagagtcctgtgtgtattttgaagttgcaaattccctggcaagccttgcactgcaccctgagtcctgcgtgccgcagtcacccagggccttcctgacattcagggagctcaggggtgttggagagtgcccccagccccaccccatagctctccttgctcctgctccggatgcctggtgatagttactattttgagttaaagcgattctgctttattaaaaaggaagtcccccagggaggggtagtactgttgaaccgctatcagtcatggacaatttagtaccaattaattaatcggatgctttcctgttgcctgcagagtgaatggggtgtgatgagtgtttggaaagggcatgaggtcaccaggtgattcaggagagatagcaaaggagcaagccaagggcgtacaggataagcatgccctgtggttgccagcttatctcatttgtcttaaaaattattttagtaaacattttcacaaaattatatcaatcatccccaaaatgcacaaatcataagtgtatggctttgaatttttaggaagtgtacacacccttatagccagcacctgggctgtgaaacagttactagttgctcctctcagacccccagccagccactgtgacccccaaggcatccgctatcctgacttccatagataacgttttgcctcttttcaaactctgtgagcgtggacttcttcaatgcgtctaccctttgcgtctggctttccttcgttcaacgtttctgttggtgaggttcacccatgttgttaaagtttgttcattttcattgctgtgtagtgttccgttgtgtgaatatactacagtttattctatggttggtggacatttggatgtctagcttttgactttcatgaatggtgatgctttaaatgttcttggccatatctgtcttcttcttttatgtctgaggttatgtgctgttctcctgggaaccgtcttctgacccctaccccaggggagcatgagtgcccctcctttaccctcccatggcactctgtcataatccaggaaagatgaatagtgatattttcagttcctaggcaaatgtctggcagtggtagatgctcaaaagcattagttgagtgaaggaacaaattttatgtcacagttttgcccagggcttctcttgatatctaagaagagcagtgtggggagactgtgttgggagtcttggggatcagttcggattcttccctagaaagactgctactcttggccaggcacggtggctcacacctgtaatcccagcactttgggaggctcaggccggtggatcatgagatcaggaggtcgagaccatcctggccaacatggtgaaaccctgtctccactaaaaatacaaaaattagccgggtgtggtggcgtgcgcctgtaatcccagctacttgggaggctgaggcaggagaatcacctgggcctgggaggtggagtttgcagtgagccaagatcgtgccattgcactccagcctgggagacagagtgagactccgtctcaaaaaaaaaagaaaggaaggaagagttctactctctgggctctggcctccacctgggtcctgatgtccctgagaatgggctggaggccatggccatggtcagaggtgtctatgagtttcccagggtgccccccagtgataagctggtgcaaaaccagcttctgcctgcttcgggtctctgaggacctcaatgccatgggcctccccagacgtaggcatttgatggccagcaggagggaagagtcgtgaagaatagaagagaagatgcaggaagaaagagaagaggagggaaggaggtgagagggagagagagagagaaccatgaacacatatttttccagacgccaggtgggggtggggagaaagtcagacaggcagggagcgggtgttcttgagggaagcaggtgtcctcatgttggagttgtattgtttgtaccagcaagcgacacagtggaagcaggaacatgagcctgttgaaatccaatgtcagggtgccctggtgggacaggcttgttttttttcccccctggcacttggcaaatccctttcacaggcagagtgagtggctttctggtctctccggctgagcagtgctgatggaacaggttattctttcttcatacaccttttgctgagctgcataacaaatgtgctgtaaatttcagtgctttacagagcgcctggatacgtaaagcaggactgcttcccctagtaaagtggaggctgctcagattccagcaacagcgagccatgtggggtgcagttgctgtgtttccaaagtaaatattacttcttagagaagattcatacccagaataattatttcttgcggcgatctgaagctgaagctggtttaaatgttcatttgtctctgcccaggttttttccgtagtggggtgtgccagggtgcttaaagccgacactgcagaatgccccttctttctcctgggcccctttgcctacagaaccatacctctcccaccctgacttatcttgttcctagagtgatggcatctaagccctcagcttatgcatatgtttattattattattattattgagagggagtctcgctctgtcatccaggctggagtgcaatggcgtgatctcggctcactaaaacctccgcctcccaggttcaagtgattctcctgtctcagcctcctgagtgcctgggattacaggcacccaccaccacacctagctaatttttgtatttttagtagagatgggatttcgccacattggccaggctggtctcgaactcctgacctcaggtgttcagcctgtgttggcctcccaaagtgctaggattacaggcatgagccactatacctggtcatgttttattattaatttaacaattatatagcacttactatgtgccaggcactcttctaagctctttgacaaatactgacccacttaaaactcttaacactctacagagaggtagagttactacccctttggagaaatgaattagtatccccattttccaaatgtaggaaacaaggcacagagaggttaagtaacctgcatgggatcacacagctagttggtggtggagctagaatttgtcttcagagtccatgatgtttatcctcatgctctgctacctctcaatgatttcttcttcttttgctttttttttttttctgagacggagtctcgtgtcacccaggctggagtgcagtggcatgatctcggctcactgcaagctccgcctcctgggttcacgccattctcctgcctcagcctctcaagcagctgggactacaggcacctgccaccatgcccggctaattttttgtatttttagtggagacagggtttcaccatgttagccaggatggtctcaatctcctgacctcgtgatccgcccgtctcggcctcccaaagtgctgggattacaggcgtgagccaccgcgcctggcccagtgatatcttctaaagcggcacggtgagcaagggcctgcctttttcagggattagaactattttttctgtgccctaatatcatttctatccaaggtggcccttgaccttacaagagcaggggtcaggcctggagcaataatcccacgcctgatcatgcctgtaatcccagcactttgggaggccaaggcgggctgatcacctgaggtcaggagttcgaaaccagcctgtccagcatggcgaaaccccttctgtactaaaaatacaaaaaattagctggacatggtggtgggcgcctgtaatcgcccactcaggagtggaggcaggagaattgcctgaaccatgaagcggaggttgcagtgagctgagatcacgccattgcactccagcctgggcaacaagagtgaaactccatctcaaaaaataaaaaataaaaaataaaaataaaagcagaggtcagtgtctggccagtggtcaaagcctacaaagcacaagcttgccctaagattcagctgcatcaggggcgcaatggacagaggtggaaaggtgaacttggagcttatcctggaaccatctgagctctggatgggagaatccccggggcctgcttttgtgctcttcatctcgctacacacacagcacaggtgctcttggcaccttgggctcactatcccttgctccctgccttttccttcctctaatctcctggggaagtcattcccctgtctcgcagtctctcctcttggggtcggcccctgtctcagtaagtgactccatcctctaggcaggtgcttagtctggaagcctggaaggcatccttgctttgcattcctccacgacccacatctgatccccaggtcctgtcaattctacctcctaaaaagctcgcaaatgcaaacgtctcttcctctgccacttctaccttcctcatgtctatctgtctccaggacctcttcagtgcccacccaatggatgtcccagactccagacctaaaccctctaaaactcttttcaaattgcagtcagagtgacctttccataagaaattctggttatgtcatccctttatgtaaaaatctcagtggctctttggtacccctagaatacaatctagacttcctagcatggctgctgtggagccatctttgacccggatcctattcccccagggcagcacccctcattgcctttggatcaggaaagatccctgtctcctgtcccctccagttatgggctcatcctcctcccatccctctgcttcccatttgttgccagaaaggggtcttgatccggaccccaagagagggttcttggacctcatgcaagaaagaacttggggcaagtccatagagtagcgtgaaagcaagtttattaagaaagtaaaggaacaacagttgttgccaggaatttgctttgtttactgtcagtatattagtaatcctagatctcagaatcacaatagtagtaacaggggtcattttttcccaacttactctatgttcaggtgtggaatttctgtctcccaagaggaaatgtgacttcactttggtgtcaatggacagaaaattctacctgtgccacatagaagtttggaatgtacttaatagctggtttttataccttgatttcaaggtggaaagaaattgattatgaatctccaataaatttaaatctcttaaaccagtaggtgcttaatattttttaattaattaatgcccatttgaatttcatgggttctattaatttaaaaaaaaataagaccccaatccatcaccatcaaattgcccttggactttttcaaggtataatatggggttttatgcaaaattccaagctgccatgtaactttcttttaaccataacaaggagggagaactgtttcctgccttctttacatgttgtgcattgttgtggtccagaaatgataaacctttttttttttttctttttgagacacagtctcgctctgtcattcaggctggagtgctgtggcgcgatctcagctcactgcaacctccatctccctggttccagcagttcccctgcctcagcctcctgagtagctgggatttcaggcacatgccaccatgcccagctaagtttttttgtatttttagtggagatagggtttcaccatgtttgccagaccgatcttgaactcctgacctcaggcaatctgcccaccttggcctcccaaagtgctgggattacaggcgtgagccaccgcgcccggcccagaaatgctaaacctttttaacgatggtgcaactttgtccttggcttgactctacaggctttgaacttcgtggcatagccactttgccatatctgcaggagagctgttctatgtgaaacatctcagagttgcaaatatcacatgtgaatgatatggctactttaagaagtgtctgtattgtatttgaagactgtttgccatgaatctgaaatttgaatctgtgtatttcaatttggtatgctaaaaagtcctgaattagtataaagatttttttgttataatattgtaatctcagttcaaaagttaactgaaaatgtaaaacccaagtgatttctatatagtaaattgaactgtaaaagttaaaaaaaaaaaaacaactaaaggaataaagcttggctactccataggcaatgcagcccacatggctgagtatatttatagttgtttcttgattatatgctaagcaaggggtggattattcatgagttttctgggaaaggggtgggcaattcccagaactgagggttcctcccctttttagaccatatagggtaacttcctgatgttgccatggcatttgtaaactgtcatggcgctgatgggagtgtcttttaacatgctaatgcattataataggcatataatgagcagtgaggatgaccagacttcacttttgttgctgtcttggttttggtgagttttggccagctcgtttaccacacaccctgttttatcagcaaggtctttgtgatctgtatcttgtgttgacctcctatctcattctgtgacttagaatgcctaacttcctgggaatgcagcccagtaggtctcagcctcattttacccagctcctattcaagatgcagttgctctgtttcaaacacttctgacgctttggctgattccaacattgtttgggtctcaaatgttctttcttctgaggagtcttctctgaccacccccgcttcccaagcctggtttgggtgctctgttccggtgttcccatggcaaccaggaaacatcctctgtgatcacactgtccactttgtattgggatttgatggctacctgtgtgtttttcccaacacacattatctgtcttgcacacagctatgtccccagtacggaatacagtgctgagttatggaagacagtttttaaaaaagttattagccaggtgtggtggtgtgtgtctgtggtcctagctactcaggaggctgaggtgggaggatggcttgagcccaggaggtccaggctgcagtgagccatgatcatgccactgccctccaccctgggcaagatggagtaagacctccatctgtaagggaaaaaacaaaacaaaacaggtcactgagccagtactatcacgaaaagaacattgacggagcagctgggagatgcgggtattagaacctgttctgggacaaactctggaccttggttaagtcattttccctctctgggcattttttttttttttttgtatctgtgaagtaaggaatctatgctaggtggtccccaagctcccttccggatgtgaggtcctgggacccatcttctgaaccaaggcttcactcttctcatctctcttgactttccaggctgtgaggccccatcttctccctctccttggcactcctgtcccttcaggatgtgctgggaagcagagcctggcatcctgccttcagcggggctcagccacggccagcagcggccttgggttctccttgcgtccaggatgagaactccttgaaattctctgccgtcctcctcctcacctcatctgtttgctgtcagaacattgcaaataggaagcttctcatgctgcctctgtctctgaattattataacattcaatagggaggcattaaatctacgtgctcctgaggctgcacttcccccagtagaaacaggagatgcctggctgccatggccccctcccagaatacacccagcctccacttgcactgggagtgtttaatcttaacaccgtgactgctcacatgtttcccatactcattcaacacatttactgagcacccactatgtatggcaggcattgttctaggtgtttaggacccataaagaacaaagcaaacaaaatccctgctctctaggagctcgctactctttagcaagcgtatagaggggaaactcatataaataagaaatataataagtaaattatataacaagctacaaggggataagtgctatggaaaaaagaaaaaaataaagcagggtagcaaggatgaaagccccctgagagttagagatttgagtcaaggcctggaagagggtgagggagtgtgtcagctatttggaggaacgtgttctaggtccagggcccagctcaagcacaggccccaaggtgggaatgtgcagggtgtgcctgaggcaccgtgggacccagcgttgcctgtggactctgcacatcagggtatctgccagagcacaatgcctggagcatagcaggcccaccgctgatattgggggttggtgtacagcctgctggacctgcagctgaatggcctgtgacttgtctgaacagtggtacttgttaaatctagtctggtcctgtgggaggagctggcaactaagtctgacaatactgtttgcaacttggctcatcgctcattagctttgtgatccttggcaaattacttaaccgctctgagtttccggctcttcatctttgaaggagggctctgacccgtgcctcttagggttgttgtaggatttgacgaagtgaccgtgtggaagcagctaactcaatgcatgttgcagccagggtgtctaataacgttagttctagtgcatcccttaccctggtctttgggcaaggtatttattttctctgaccctcagtttcctctttcagaaaacagagtataatagtccctgagctgcctactgcttaggctttagtaattatccagtctaacaatgcagataatagtactttatatatagatgacaagtttccaggggagagggtctgtgtgtgtgtgtgtgtgtgtgtgtgtgtgtgtgagagagagagagaggagagagagagagagagagagaaagtgtgtgtatgtgtgattctgtgtatgtgtgtacagttctgtgacacagggttttttttattatttaataaatgtttcaaggacaaggatactgtattttttacaagatcttatgcctcgcacacattaagtgctcagtaaatccttgttgaatgaatgaaagagcagtgaggaaaatgctctttgctagattaaatgtgtggatcagaagcagcagagctgtttgcttccaggcaacgggaatgtggtaccgttgtgaattatatttattgataacttaactatgtgccagctactgtgtgaagtatttgcatgcatttctcatttgaaactgcaaatagccccgtgaggtaggtactattattattcctgttttacagacaaggcagctgaggctcagaggttaatgtcttggtcacagtaagtgagggagctgggattggaactcagccttccagaaggaatacctatgccagttgctccggaggctgcctggaatatcgctgcctctttccgtggcctgatgtctcaggaggaggaggaaggatgttcttgcagccaggccaggaggaaagtccaaggctgtgaagtcactgctcaggtcaccggtgaaccttccagtagaaggggagaaggcgaaggggttgcccttccttgcctgcaatagacaatgaggacgatcaaagacaaggattgttctctgccctgtacttgaatttgtccttttcctttcggtcttagagcatgttaagaacttggtggaacaaaccttcacgttgtgcacatgtaccctagaacttaaagtataataataataaaaaaagaggacaaaaaagaaaaaaaagaacttggtggagatatgagagctttgggccttacgcttccttcttaggtgcctaaaacctgaggatgcatgtatgtatgtgtctacgtatatgtacatgtatcaatgatgtacatgtgtatgtacatatgtgtgtacggtatgccttgtatatgtgtatgtctgtgtggatgtgtgatatgtatatgcatatatggtgtgtagtgtgtgtgtgtgtgtgtatgtgtatgtatggtggttgtgtgtgtctgtccttcaagagcagcgtgaagatctgtttctctgcaaagcctcctctgaccgtgccttggcagtgctgagaggtctcagcctgggcctcgttccttgactgtgtgactgcggttcccagcctgtgccgggtgactgatgtctctgcctgcctcccctaacacagtgagcccctggaaagaatgtcttgtgtcatattagttttcctttcacatgcaacggtatgtggaatggatgttgagtgtgtaggtgaacaaatgaatgaacaaatggatggcctccatgccaccactgcctatactgaccttggtgagcccatcatctactcctgatcactcatgtcgggggcttaatatcaaagaggctgccttcctatggttggatcacccggatgggacttcaatgccagaaatccttggcatccacgtggacatggggaacatcagtgtccctgtgcatggttggtgtaggtgatctccccgtgctctcagatctgttgagggactgggctgggcagccagctgtggtctggaagcacctttcttctgtggttcctgagagttccctatctggcgcccgccttcacgttcccttgcctgctggctgggtcggctggaaaacgaaagcattgggaagttgctcttccctgtggttaatgtgttccatgcccgctgtgtccccctgcactcaagttccgggcaattaccctcctgccgggttttgttgctgagcacagcaggtgggccttgtttgtaattcacttgcaccattaacgctgggttagcaccagaagggcgactgatccattcagtgcccccagccccagatgccgttccatagcagggatgttagttgactttgggggtccaactgattgtcgattaaggcatttgagaggcttaatccattggctgtcacaaagtactcaaaatcatccacactaatggaaaatctgtacctaaataccagtctccccaaatcatggtgatttggctttggacaataatagcaataatcacaataacagctgtcaaacattgagcacttgctatttgcaggcatactgctaagatcgcagctaatatttgacagcaaccttaggaatgtctagcattttctccactttgtgaatggggaaactgaggttttgagaggttaatcacttgtcccaagtcacatgactggtaggtagcggcacccaggctctgggagctctgtttaaaacagatgcagagcttgtgcggataaccactcccttgtactgcctccttctgggagttttgtgaagttttgtgagtggagggagtggggggacatctccagcttgccatcctaattattttttttgctagcattgatattaagatgagtcactgagtaggggaaagatgaataggattaaaacatcctctgtaggttcacttttattaattaatcaatcatacacttattgagctccaactaggtggaaaacattgtcctaggtgttttgaagaaaacaaagataaatcattcatctgttcaataaatctgagagatagggagtcagacatatcctagaacataagatgggggatgaattggtagggcgcgttggaagaagaatgctaggaactaaccaaccacaggggtctgatttagaagaaaaccttccttaattctcactgcatgttatcaaaccatttttcacatgtaacatccctgatcattgaacagcctggtgaagtaggcagggcaggtagtatgtctcctattttatgggaaagtaaggcacagagagattcaaggatctgaccacagttacccagggaacaagtggcaaaaccaggtttgaacacaggccttctgactccaagtccagaccctttactacaaagatactttcattagagcctaacatttggggatgagcggatccagactcatcagtgtgtctgatgtcccacatcctacagagactggctctggacctgccagggctctgcttcccttggagaaccaccatacgctcctacccaacgcatagctgcttggaaattttcttttccagtttgtgggaaaatgtctgtgctctgatgttccagtggaatcagcccagtttgcttcagggtcagttttccccacattcacactacccccaacatgttgctaggtgtctgttaacttctccaggccatcgggcgccccttggtcccatggattttttgagagcacagctctggtcctggccctcccttgcccagaaacttttaatggctatttgttgcctggaggataaagtccaaactccttaaccatggcatttggggccttccagaatctgactgcaatacttacccatctctgagcccctcaggaacaatgggctcctgccagatttggttttttcaccatccttcgaacagcccttgcttgctttccccagcacttacctggaaggtctctccccacccggcacatgcctcggggctcagtgtgtggcccacatcttccaagattcttgctgcaactgcaggggcgcagggacatttttctgcctgccttccagcactgttccttgttttgtgacagaggccaccctgacttatgaaagcggcttcgctgtggccgggcatgctgagttcccgcagcctgttttactcttcacacaaggacatcctacttctccagggagcttcttgagggaaggcaccacatcggagggtcccggtggccgccagtgcccagcatggagctgggtgggtcccaagcatgtgggtatgctggcgcagtgccatagagctgtgagatctgcccatgtggcagccccctgttggaggaggtacagtacccacagcctttttccctcttctggccgccggagctgggttctcgggtgtatgtgccccctcaccaaggtcccatccttgttgagagcagggatgacccacttgcttagctagggaggttgaggatttcctcaaggctgtcctgtgactatagaccagagggggctgagccttcagcctctggacttctaaaccaggggccggagactagcctgactttgcctgtggtttctgtgacatctctaggccactggcagagggaaggtgatgggccctagacgggctctcttctgtaaactgtgtcaaatgcagatgcccagggcagcctctggatggggtgccctctgcatgcctgacccccttaggagactgaacatagtggttccccagagttcctccttccctgagggagggcctgagatccagccaagaactagagccagggatctttgaggtgagaatcatggctgtaggcaggtgaataccagctgtggagggggtgatcctggttggaggagtgcaggtcttggggtgaactcccaggctcagcactgagctccagcttctctctgggcagccagagcataggctgtggaggaatgttccagagaggccaccagagacctaggcaggcccagcattcactgaacacttgaacctgggcataggtgtattagcctcactctgcagaggggggatgcgggctaagggggttaaggaacaggcccaggtcttggagctaggtattgagagagtcaggattctttattgtgtttgtaattattaaccagactttttaagtgaaacaaacaaacaaacaaacaaacaaacagaaaaaccagtctaacctctcagttaaaaatgcaaacaatagagaacacttgagaatgaaaagcaagtctacttccttctccgactggagtcctgtatcccctctctgggggcagccagtcagcagccagtttctcctcccttggcccccgagggagcctggtgccagggccttgccccaagcagatgggagtcagtgctaactgggctgatggaaggggaggggtggcatgggccctgcatgtgcccttaggcaattccgagagactattctgagcttggatgactctagtggcataggtctccgaaccttcagcaggacaccgctcacgttgctggggacctatctagctctgctgccctctgccccacacacctgggagggctgaggggggctgattctgggtttctccaaggaatgcgcacatccagagatagctcctttctcacctgctctggctaagactgaagaaaaaaaaaaagatagggcctactttctgacgatggtggataagacaacaaaaagcactgatgtgcaccagaagtggccatggacaggacagatgtagtggggtctccacctgggcatgatggagccaggccaagggacaggagctctgtgtctgtgcccagcagctgtcagcctcaggacttcctctttgtcacgaacagccgttccagtgctttcctctggctttgacctgagtaccgtcacctgggagtccagcatagccctcgctggcttcaggtggtggcattgtgcctgcatgggtcattacacagctgccacccatcccaccctcttctccaggctgagaaacccagctcttctcagtcctccttagggaaggttgcagcacacacaccctcactcaaacacagacagtcatctgcaggactgctcatctcctcccaaacacccagagagatgcctagcagaggagagagggttatatttatctggaggtgattaaaatgctgtccttaaaagttgttctctccaagttggtcttctctcctgctcatttgattcctctgtgggcaccccttctgccaggtgtctctgctctaagtgtgctataggtggcttcagaactgagctgttttgtttcaaagccttggctcatgtggtctttgccaggagcgcatgtcccccagggcccagcctggtggcctcagataaatgtcagggatatttgtcaccattcagagccagtcctgcccttcccatcccacaggtggaagctctgtgggcctcatcttccacctcccgtggctggcaatgagctcttcctcctctcacctctgcctacctccctttcagtgtactggagatgggagctgcgggctccttgccttttctgtgaaggatgctgagtccagttcagggttcatggagaaaatcggccctcaatgcagagccttatcctagaccaaggggtgcagagggagaggggacaggcttttgtacttacggatgccacagctaatgagggagactggaaatcaacagagtagatatgcagaaaagaagctctagctttgtggtttcagcagactccctgtgatttctgaaactcactgtgccatatcccatcctaggcctctgccctcctcatgtgttgttttctccatcctggtctcttccctgctcttcgcatcccccctcccagacctggctaactcaagtcaaacatttcatccttagggaggtcttccctccctgctgcaccctgaaccatcctgttcttttccttcacagtctgtaattatggcatcaagacacctgaatatctgattagtgtctcttaatgtcccagactgtaagctctatgaaggcagggactgtatatatcccagggcctggaaaattacctgccatgcagtagacactcagtagtattcactgaataaagtataaatgtatagtggcattcggtatgtgtacatgctttgaccggtcttgggtatgggaacaacatagatcttttggccgcaaaagcactttactcacctgcaaagtaattctacttccatgatctcattgaatcctattaacaacccagtaaggaagatgatacaaatgtcatttcccaccttacagcagaggaaatggaagccccaagaggttatgtgatgggtccaaggtcacgcagccctctacttccaatctgccgatttttctcctctgccagaaggactgacttcttcagggaaagctttgggaatggggttgatctggacctgcactctgcaggtcagagggctgtggattaataccagcaagcaggcatgggaggccatcctattggggaaagatgaggatgccatcagagtgtctgtgtacaagggctggaaggaagcactgaatggggtggagagatgaaaggcagttcccatttactgactgcattatacttgaggtctcttgaagcaacctttccagggagctattgtctgcagttttacagttgtggaaataaagttctcagagattaagcagccagcccaaggatgcatagtgacaactggaattggaagccagggatgtcttatcatgtctctggggaggggccattgtttagaggtgcattaggggtctgaaatctgtgtgaaatgtagagaggaaacaagacttgtaattcctcattcctcttgctccttattgcctgagcatttggcatgactgtctgtagtcctgtggcctggttcctaccatgtacccacagttgtagtgctcagggaacgtcctcccctcaagttggacccgggctgggtggtcagtgccgccactgctcttcagtttatttaggtgagtcagaccaggtccagctcccagagtgaatgctcattacccctggctaacctgctgtatcctaactcatcacagactcctgggagcatctcctcatgggaattcctaaaggccagggacacctgggctgatcttttggccaaagggtactcccagatgcattcttctgttgctggcccccttattcagcaagatgtgcaggtgacctgcttgcatttagcttgacttattctccaacattattatgatcatcataatcacattcctacattttctcaagtgccaactgcatgctaggttctgggacatgcagggaaggtgggtgtagtgagtgatgggtgagaacaagttcccggagccaacgcccagttcctccatttccccgctgagtgaccttggcaagttacacaacctctccgcctttgagttccaggtctgcacgtggggaggatggcagttaggatggcagtatctgcttcgcagggttctcctgaggagtaaatgagtctgaagtagtactttgcatatagtaaatattcaataaagattatattatcatagagttcagttcttacaactgcagaattcccagagcttctaagaaccttagagatcatctagtctaattccctcattttacagaatgagagactgcagctcagagagttgactcccagagctggtgagcacccaggttcctgattcctgggatagtcttgcatcctggcatctccccatttgttgtcagggagagaggacacctagaaagtgctgcccaactgcattaggccacaagggttgattctccctcaaggaggccacagaggctggagcagactcactcccctgtcatggccaccccctacccctgcacactccatccaggctgctggctgccacttggagtttctcccagccagtgggggagtcaggacagcagagaagttcacatccattttttttttgaggagcctggagcatcaggaagagtaatcaagatcttgttgcccacagcggggaaaaaagctgtcattaatctgactgcccctctgatcccctctacccttcctgccgccccacagagactggtggctatcagcctcctctctgacccacctcagaaaatcacaattaatgatgtagtagccctgtgaggatgagagagaccagcggagggactgctgacaagtcaggagaggagaggctatttgcacaactgggccgatggagtccagacagcatgtgcacagccagaataccatgagctgtctgcaggtggtgcctgtctgtgcttatgaactggctgctgctcatgaatcagcaaacatttattaaacttctagtcagtatggacataatagcaggtgtggcaggtgatacatgccccaaagagatgttcccctgctttaaaaaatgcaaagtgaaatagccattcattcattcattcatgcatgcatgcatttgacagtatttatgtgtagctgctgcatgccaggcactgtccaaggtgctgaaggtgaataagcatgttaaagctcctgccctcatggggcttgtattcaaagtacaagcatggaaccagggggccagtctctttccattgagagagatgttagaggatcttctaggttgagaaaatggatccagtcttgcagttgtaaaaaagtggaaatgagtttccccttatgggaaaagaggagacactgattttttggtgttaaggtaaggacacatcctgggcaggtaaatggttaagcagaggtgagaacttggaagcctcagctctgagtgcggtgctcacagtgcatctttgagggctttgggggacagcatgtgaataaatggtgccccatgagctgcggacagtgaaggctggagggtcaaaggaggagagcctgcatgggtagagaaatcgtacctagattgtaaattcctcctcttcagtgacaccaaataccactcacatgtaaatacttgcagttgacagagtgtttccacatatgttctctgattggactctttttttattccagcagatactttctgagtgcctactatgtgccagcctgtgctaggcactgaggacacaggtggaaaagcccgaattgctccctgctctcctggcgctcatcaccccggaggtaggcactgccattcccatattactggtggaggaagaggcaggctctgaggggggcagctgctcaagagcattcattgtaaggcccagagccagatggagcccagcttctgtctagtctgggccttcccttccctctgcactcaggatcagcaaggctcctacctgttgggtgtcgagaacagggttgtcaaatagatggggaatttctgtttttgaactgtctgtcttccaaactacctaaagtacgggaatgaggcccagctctgtctaggtggggactgtcagagaccctctgaggttggaagctgtactgacatacctgctttcaacctaaattctgccaacactgctgaattcaactgtagtcaaagcaggggcctgggatttgtgattgcatatggttagacacatacttcaatttgaacccagcactgctgtttttgttgcgtgagcttggataagttactgagcctttctgagcctcagcttcctcatttgtgaaatggagatgcaatgccatcttacaggatgagtgcgtggccatgaagagttagtatttattattattatcattattattattagttgagacagtatctcgctctgttgcccagggtgaagtgcagtggtgtgatctctgcccactgcgacctctgtctgccggttcaagtgattctcctgcctcagcctcccgagtagctgggattataggtgcctgccatcacacccggctaacttttgtatttttagtagtgaccgggtttcaccatgttggccaggctggtctcaaactcctgacctcacgtgatctgcccgccttggcctcccaaagtgctgggattacaggtgttagccaccacacctggccagtatttattattgagtgcttactctgagcagcagtgcatagcatcttatcatgcaatccttatagcaattccacgaggggactattaacatccccatattacgaatgaagaagtcaaggtttagagatgttagctgatttgcccaaggtgtgcagctagtacatggcagtgtaggactcagccccatgttcttacctgtggcagccagaccaagccccaggcacagaatcagagggcggcacacatttgtttccctccccttctcggcatatattactgtgattccccttggcctgcatctgctgcattatgtctgcttaggttgtttgttttaactacagtgaatatacaaaatgcacacaccaaactgggaatttatttcatattggccccgtctgtttatttattcattcagccgatattattggagcacctactatgtgccagatagggtgctgggtacttggtgctctccagacagcatcgttgtcataggtaggatgtgtgtcccagtgaggcatgttagggtatggtggcagcagatggggaggggatcacagaagcctcgaggggagctgatgagctgaacctggaaaacacagcttgcagtccatcaggggatgggactgcattccaagcagaagcacatgcagggggcagagggcacagtgaaaacacacaacttttgtagaggagtggggctttggctctgctggggcatcaggtgccgtagggtacagggtagggacaggtgagcaaagccagatcatgggagggtttatccattagattgaggggattgccctgatctcctgtgcaatggagagctccctaagacttcagggcaggagtgtgtcattatcaagtttgtatttctgtaagaagcccctggctgctctatggagaaccaaatggagagagaaagaccagaggatgggggcccaatgaagatggtattgcagagatccaggttgttgctgacaaatgtctgtgcttggacagccggtggtggtggagagaaaggtgtggtatttaggaggcagcgctgtcaggatctggggacttattaaatgtgggggtgtgggaacagagaaatctagggtaactctcagccttgtggcttgggtgactggtggattgtggtgttacctactaagaagaggaagtaggaggaggagcaggtggcgggcttggtggagactacgccttctttttaggacaaggtgtttgtggcatgctgtgggatccccaggtagagatgtcaccaggcagatgtgcggtcataagtctgggcttgagctgtagatgtcaatgccacagcatgcaggtggaggagaatataccatgggcaggggagaaaccccccatggagggtaatggtcgtggaaagagcaacctggtgctctaacttcaggataagttcttttttcgcccctgaattattaaaatattttctgttaataaaggatgcattattaggtcctaagactagatttatctgaatgttaagctgaaaagaagaccccaaatgtctttgtgttttttggtgaagaatctgaaagcttcatctttctgctctgtagcagttaagatagaaaagctagtggagtgagagacctggttagccttggctctacctccagacagttatgcgaccttcagctagtcatgtatcttttcttgggcacagcttcctcatctgtaatagagcttgttctgcggtttaactatgataaagactgtgcaaagatttttgcaagccactgagccttacagacatgcaacatggtggctcttttcattcttgtaagatttaagaggaaattatttctcatcactgtgtctagggggtcacagagctgaggcccaagagcagcccaggacctgagccactgtcatgcttaaatgtagtctcggctgggtgcagtggctcacgcctgtaatcccagcactttgggaggccgaggcgggtggatcacctgaggtcaggagttcgagaccagcctggtcatcatggtgaagtcccatctccactaaaaaattagccaggcttggtggtgggcacctgtaatcccagctacctgggaggctgaggcaggagaattgtttgaacctgggaggtggaggttgcagtgagccaagatcgcgccactgcactccagcctgagcgacagagcaagactctgtctcaaaaataaatgtagtctccaggatccaccagtctttggggccatgagcagcttcactcagttcctcaggcctgcacgaactgcgtgtagttctgtcatcaaataaaatttacacagggtaatctgacacctatttagcagtctgcttaataattatggtgcagcatgctgatcaggcataaatggaaggcatttgaggtaagtgattgtatttagtagtacttttatatagcctaactggattattacagtttttttctccttgttccactcaacaaatatttatccactcaacaaatatttattaaggccgtataatataccaggcactgttctaggccctggggatatagtccaaacaagattcctgtccttgccccacctctattgagcttaaattctagtagggagacagaaaatcactgaataatcaactttatccataataagtaagaatgtctagcttctcctaagactgtgtttgctttaatctatccctgcaccaacacccatgaattaaagaacaaagattctgggcctgatttgccaacagcggagttgccttcacccccatcctttactctttatcttcctctgtcttcctctagcaggtgattgcttgaggccttccattcattgaacaaatatgtgctgtgcacctattatgtataaatagaccctggggatgcaacaggaacctggacacagtccttgcccttaaggagcacatactgatcccaggcctagacgcataaaggcaacagcagaggcaggaaaagtgctgctctcagagccatgcctgggtgctgatggctcacagagagaggccccattctggccatggcaggggtgagcagaggggtgttctttgggcagaagggatgccctgtgcacaggaagtgacaaggctctgcgtgtggatgaaatgttgagtgtgttgggggaggcggagtgtccctgaacaagatttttttctgaggcataacacacataaggaaaagtgcacaccccataagtttacagctcagtgatctttcacaaagtgaacacacctctgcaagcaacactcagcgtgaaaaccagagaacatcaccagcactggggagtcccctcgtgtcccctgccattctctaccctaaccatgaaactggacttccaacagcacagagtggtttggtctatttttacactttatatagacagaattattctgtctctagaatgtgtaatcttttgtaatctttttacactttatatagacagaattattctgtctctagaatgtgtaatcttttgtaccagtctttttttttgctaaatcttatatttatgagattcatccttgctgttgcatgtggttgtcgattattcattttcatttctgtataacattccactgtgtgcatatataatgtatttctccatcatgctgctggacatttgggtggtttccagtttggggaaacgaaaccaccagagtgctgctatagacattctagtgcatgtctttgctaatcatatacatgcatttctgcttgataaatacctaggaatagagttagtgggtcattaggctagatgtaaagctctagtataccagttttccaaagtacttatttcagtttacacacctactaccactgcataagagttccaatttgtccacatccttgctaacacttaatgttgtctttttttaaaatcattatagtgagtgtacagtagtttaaaatttcattttcctgatgcttaatgaggctgaacaccttttcagatgtttgtaagccatttggatatcttctttagtaaagtgtctgttcaagcctttgcccattttcctattggattgtctgtctaggggttggaggacgaaacttttttttttttttttttttttttttttttttttttttgagacggagtctcgctctgtcccccaggctgcagtgcagtggcacgatctcggctcactgcaagctccacctccccggttcacgccattctcctgcctcagcctcccgagcagctgggactataggcgcctgccaccacacctggctaattttttgtatttttagtagagatggggtttcaccctgttagccaggatggtcttgatcttctgacttcgtgatccacctgccttggcctcccaaagtgctgggattacaggcgtgagtctgtattaaaattaaacattttaatactactctcccaatccaggcacctgggattagcatatccaggtgctcatcagccgcaccctcaccccagtgaagccagcagagctggctgtcggcagaatctgggtctcagtgggggccaaggcacgtgctgccttggggagaggcagctccctgcaaggttctggatttgacatcagaggcccacccacctcaggaaggaggagagggattggtagaggttgggggtggggctggttttcagcggtagtagagcagatgtggaaagcagctgataacctgggaggtgtgtgtctgctctccatatttgctaggaatggaccgctcccatctgggccagggaggacctgacatttatgtagcacctcatttaggccagaccctgagcatggtggcttctccgatgttaccttgattcttctttagttcaactccaccaggaggggttgttatagtacttttacatgtgaggacactgagccgagacacagaggggaccttgtgaaggccacacaactggcaagtggaagagctggcctgaacccagtttcctctcacacctctcctcagtgtgcagtgcctgtgctgcgtttggggaaatggagtaaccctcccaactctcccatcccttcctcttctgctcacccatggctccaattccttaagggcagatgagggttttgtttgtttgagacaaaggctcgctctgtcgtccaggctggagtgcaatggcgaatagcgcaacctcggctcactgcaacctctgcctcctgtgttcaagtctgtgacacagggtcccgagtagctggaattacaggcatgcgccaccatgcccacctaatttttgtatttttagtagagacggggttttgccatgttggccaggctggtctcaaactcctggcctcaagtgatccacccactttggcttcccaaagtgctgggattacaggcgtgagccactgtgcctggctgcgagcagatgaggttcttcatttctaatgacacgccatgaatcatccaaccacagttacagcaacctgccccatgtcggtcacagagctgaagttagaacctgagccttctttgagcccggcatgtaaggaggaaagacaaaggggcctctccggctcctgggtgtcactgggatggtggggcagctgcctagctggagcctgggactcacgtgcccccaaccccctctctcgcagagttatgtcatgcccaggccagcagggggctccatgaggattcatagaagatgccccgcgtctcggcgcctttggtgctgcttcctgcgtggctcgtgatggtcgcctgcagcccgcactccttgaggatcggtaagtgtggcccagcttggggcagtgcccccacccactatcccaggtgtccacaagggacatgagagtgctgcacaggacttggggaagctgcccagcccgtgcactgtgccctccctgagtgtggctggggtgaacatgcaggtggtggtggtggaggcagctgacaggtgaccactccgatctggtcaacctgctgagctccccggccactagaataaagatgctgataactccctagtgcagtcaatgtaggttcagcctagcaggttaagaggcagctgtcggggaaaaaggagggtgaggatggccatggggactccaaatctagggctggagatgggagaagaggtcccttctttcctgtgatcagtccaagaaggcttcctggagagagtgctatgtccacaacttggaagaagccaggagtctgctggcgtggcctggctgcttggaagggcccttgacattgggtctgcttgctgtggcctggctctgagagggagggcagggtcatgtgagtctctcccttgccttgttgctgtgggacgcccactttaggtgtgggcaggcgggcttccacctgagccctcagcatcccatccctggaggggcgggtctgggaagtcaggtgcctcctccctgctgggactgaacaagacttgtcaactgcaggttgaggctctctagatcctggttcctggggacacagccagccacagggacaaggacacagttcagtccggcaggcgcagtgtggtcatctgatggcccagcaacagagaacccatggaattaggacagatgtggggtgtcggggatcaggggtgtctatgtgtacatcgggggatggggattagtgtggacaggtgggtggggcacagcagtgacaaacccagaaaggtaggttgatggccacaagacgacccatccaacagcagggccccaagggtagagttaagtgacagccctagaggaactcaaataccaggcaggttaccccaacggataaccacatgaggcccctcttcccacactgggggtggggttgggggtgggagcaaaggcaggaatctagatcttaaacctgagcctgaaagggttagaggctgacttagagcaaagatggcacgatgctgaatctcagggagctgacttaaagctcccaaattcctccaattgcattcaggtcggtgtgctggtgatggtcaggaggccatggtgtgggcagaggtgggcgagcagccaaaacctggctaggccaggggtcacaggccggaagcccagcctgcaggtctgtgagctgcttcgttttaccttgtgggcacagtttttcatgcaaatgcagaggagctgattggaatcagaaatgtggacaggtgacccagttctccccctcaccctgccctcgacacactgctctgcatgcttaaaaaaaaagaaattaaaaaacaaaattttccctccctcttctccgttcatttttacagaaacttcaaaacctaatttaattctgcttagcagcaatgcaaaacggttcatatccttaagatgtttaatttataagatgcctatagtttttcagcgtttgctgcaaggtcttctccctctctaaatgagtgaataaagtggcaacccatcaatttccatttgtcgctaatgggaagcggaaagggattgagccagaatcagtagcacctcatggcctcgcctctcccgacacttgtgctctgggagggaagcagaaagcggagctgacaggtccctcttttggctgccacaacagagggcttcaaaggcacccctcgtgctcccaaacccatactctgaacaatgcttgttcagctctgtcaagactgctggccctcagttttggttcatgctaggccacttccagccgctttccagccaggggccctgctggctggcaaggtcaaaccgggcctaatctcctgcagaggccaggaagcagagttaagccaacagaaagggaagaaaagaaaaacccaaacagcagtgccaggacccgttcttcctgtctccttggttagcctgagtgccaggagctttttaaaatctcccaatccttatggatggaaagttgctaattacatggactccagaggggatgtggagtagcgcagggatgggaagagaagtgggtcaagaaaacacaagtagctgtgctgagcagcaggcagccttgcatgcagatgggctgggctggcgttaactgtgctggggtctctggggtccttgagaggcttatgggaagggaaggggctgctgctcctctcgccttcccaggggtcacttttccttgcatttgagtttttctggggttttccccaaccccagcctcagaatgggtggctctctgaatggggctgcatgaagagaccagggatctgagagataaatcgccctgtttgctccatcctcagccccacttgtctgctggtgacaatatggatgtttggaaagaggtggccgaacccattaccctgccttgtgatggctgtttttcattcaagtgaggtacagggcaggagatacagccaaattgtctattacagtgtttggtgtttacccctcgaatgaggttttgggtaaaagaaagggattttatttatggctgtgaggctggctgcataaattccccaaactctcacacatatgtcaaccccttccatcatctatcttctgaaaatgtgtttggattttgcttcagtccctctgggtcctctgagtgataactgtggagccacaagttaataaatgccctgaggagaccccaccccatctttgcacccccttcattacttaaagagaccagagatcattgtcattcttagatccggaagggactgtaaggattcgttatctaacctgctcatcttgcaaatgaggaaacagggtcacagcaggcagtggtttggccaaggtcacctgacaagtaggggcctggctggtggcagctgacactggtgctggtatccttgactcctcttccagtgctctcttctccatgcacccatgggctcccttagctgctgagaagcagaatcaccttcaatagtatgtgaaggttatattctcctacagtttcctccattcctgttcagaaaacatttcagacattagcaaatgtgttacccttgcccctaacaccttgagactcattaagtatttgttaactgaatgaacgctaggctccaagcctacctcttgttactccttccttggctctgtattttacctacactaaaccactccctgtgagccaaatataccaggaggatttactcccagctttacccattcccctgctctccctatagtgctcttcctcccgtttcatcttctctgcctgcaaaacaaatccagctcctccttctactcctcttctttttcttcgtcttcctcctccatcaccatcagcttaaatggctcttcctctgcaaagtcctttcccgttatcatcctgtccgtaagagggagaattcatctttttcctaccattcccccattcccccagcacataacatctgttccagcacttgccgtgttatattctaaagattatggcattttcccactagactctgaactccatgggagagtgatccccaacagaagggcccaacacatgatgcaaagaagtatatgggtgcagtttaatgaatgtgatggatagatgaatccatggttcttgcaagactgggttttccaataacatgtttggtatcattgttttaaatggcactgtcttacctatgcataaagaggtaaacttattggagaaagtagaagagaaaggagaaagaggaaaaggagaaaatgtccatctgtctgtcttacttaaaagagaataggaatgggctgaagatcctggttgggttctaatgaaagctttggcagtaataataaactcaatgacacaattattcattcattaattaactcaacaaatatttattgaatgctatgtgccaagcactgaggatgcagtgctaccaataataatcaaaataataactcccattctttgcctggcactgggctaagtattccccatatctcacccagtttcattggaccaaacaatcccctgttacagatgaagcaatggaggctcagagggtttaaataacgaacctaaggtcacacagctagtgaaatttgaacctgtctccaaagctgtctcttcctgctcttctagagctgatgaccccctggaaacatttgggatatcccattatcacagccatcacattaaatacattgtgttctgctggtaaggagttgaaagatggaatcatcatggctaatatagtttcctgctcttttatggacactttttacctcaaaagcatttcttaaagggcacaaagtctagttgagagatgaggaaactgaggcatggggatttcagggctcagtcgaggtggcaagggaagttctgctcagcatgggcatattagacacatcagcaggttattgcagcaattgaatctctcttgtttaaggtttccctgtgtggtaaagcagcaagagcttggatttattttacactctgtcttacgaggaccctccaagcactttataactgtaattttttacttagttggtttccccccaatgagctccaattctgtacggagaatgttcaacatagaacattgaaatgttataaagataaagataataggagaattgggggagacaagggaaaaggataaaaaacaccagtttcttatcctgttatgctgtgtattaaatatatctaatccaccgagattcaaatataccagctgaattctttgccttgtagaggattcaccatgggtttgtttgagcagtgggctcctctgatcatgttagcacatgatttgatttatgaaattttgatcagcatgcaacttttcatctcatttccaaattgagtcacccatatagacaatcaattggtctttcacattagtgacaaatagaaattgatgactttctccttcatctgtcacctacggggggaatatagaaggatttctaggacataaatctctcccctggtaagcaccttagggaggctgtgtctttcttattcatgtctgtatttccagagtctagcactgtgcttggcccacagtagtgggcttagtaaatgtttgctaaatgaattcactgtggcaagatctgaattttgagctgacccgtcagtttgcaaacttctcttcccccaggaattggtcaaggtttaaaaatgccaaccaatgttattgtcagcccataaaatacataattaggagagtaaatattttaccaaaagaaaaaaaagtctgcgcgtgtgtctgcacacacttgtgcttatgtaaggctatctctcctctcctccttgctcctcccctgccaccaacacattttggggtgactgagggaggtgtggctgtagtgagagagatattcaggctggcatgctgtggtgtcatccgtcttcccttggtcttcaggagccaagggtggttttgggatgtttattctctcttttgccctttccaaaacccattgtgcactgtaacttcatctgtaatctcttctactgagaggttagagatgaattaggcctagatattccgttttacagataagaaatcccggggtcccaaaaggtgaaaggaattggtgaatgcccttttggtggtgccaggactcctgactcccaaccgcctgggtgacatttgtgccatggtttgtggtgtatagcgtgttcttacacacatgttaattcactttccccggtgacctgcaaggcaggttgaagtgagcacatcttgtggagaggagcctgagtctcccaggtttgtgacttccccaagcttgcatagaggtgagtggtcaggtcaggaagagtggtcacatcaaaggggatggaccgataagcatctgaggacagcgttgggacagggtcctgaatagcctgctggcagtgtgttctcgatgagtgagatctgaatgccaccaggggccagtgtggcgacgcctgggggctcacaaaacgaggcagagctaaagagaaaaagcacataggtaatggcagtgagcgttagtaagtgttgcttctctattttgttttcttaagcatattgtgatccatcattggtaaggatcccactggtagaagtgtcagacatgaagggatggggctattgttccatatctgaagtcttaggtaacagagctgatttccatatcattttggtatgtggctgcctgtgttcatttgtgctagaatggcctgagtatctccaggttttcaacgaatattatgggctgatggtatctattcagttggatcgagcagcgtggccagtggacctgactggcagtattggattcaacagggatgaacaccatattgaaagagtgatggtgatatttcatgagaatttcaaaagcctgtctccagctctgtgaagtcatttacaaaacgtcttgggatgtggagtgagtcactagcaagctctattttggtggggggtgttgggagtggaaattatggaaagaggttttgattccttgtaaaaaagtgttttccaggcagatggaatgggcttttttggataccaaggtccccatacccggagggggccacacaggtcggacagggatttcagcctcaaatgtggtattggacctgttacctctaagacccccttcagtctgggatttggtgatacaatcttttcacctttggtctcttctcatcctctcatagggagacatttcattatcattgtgtcctcattaataaccattaacaagagcttagaattgaggcaaccagctgcctaatttaagccatgaccccatttggctccaatcctttggataagccaggtaggacataagaaccctgctaattcttttgttctgttgatgtagacctgggctgtctgggtgcttccttcctccctgtggccactgatggcagagctggagaagcacaggcaatgtggaagctgctgctagacctcagccgagtgcctgcgtgggcgggacgcgtgcgtgtgcatcgctggagccagcacatcccactcacagcctcgcggctcgtcagcaggcaagacagtggtcacacttagctctcattagtctggataaacaggcacacgttccctatcagctttacgggggctggggctcggctcggtgggtagtgtgggcagcagggtgctgcagacagctgtcaggctgtcccattggtgtgtgtttcctcccattgagctgagatatggtacctgggcagctcgtggtggacccagccagcgaggcccattaaacccacactgatgaggggtgttgtggagaggacactgaccagtcaggtgcagatgtgcacgcagtggcaaacacagtcctatagctgggcagacagtgccactgtgctggactcgagaggcactgtgactcagtctaatgctcaaccctgactggaggtctctggaattgagactctatctatctgagtatgacccctttagaaaaggttcatcgtgtctgtagtcccagctacttgggaggctgagagggaagaatcacttgagtccaggtgtttgaggctgcagtgagctatggtagcaccactgccctccatcctgggtgacagagtgagaccctgtctcatagatggatagatagatggatagatagatagatagatagatagatagatagatagatagatagataagtaggtagataagtacataggtaggtagatagagaggtaggtaggtaggtaagcagacagacagagaaagaggtaggcagacagagagataggtaggcagatgaaagaaataagaaagaaagaaaaaagagagaaagagagaaagaaaaaagaaaagaaaagaagaaaggaaggaaggaaagaaagaaaagaatgaaagagagaaagagggaaagaggaagaaaagaaagaaaaagaaaggaagaaaaagaaaagaaaacaaaaaggaaagaaaagaaatgaaaagaaagaggcttacctctctgaaaccctaccccggggaagacgtcagccccagccctttaagctcccatcactccctgtgtttcaggtggggaatcaacctgaacggggttgactggtcctctagggtagtccacaagggggtcccccatgtctccctctcctctcagtctcttccacctggactcacccaggttccttcagtggcttttcatatgattgaggaatggagtcagatgtgttgtggggaaacactggagttggctcccgggaggctctagcacagtgcacatattaacaccaggagcgtgggctctggaaccagactgctcggatatgaatctgagctccaccctttactagtgtatgactttgggcaagaacataatttctcagtgtctccatttcttcatctataacatgggctaatagtagtccctgttttatgcttttataagaattcaataagttcctgcatagaagcacttaggatggtgtcaggcatacagtaagtgctatgaaagtgacatctgtaattgataatagtactactgggccagcctgtttccatctctagcctttgcctgcccggatcacccttcctcatttctccaccaaatcttgtctcttctcttcttttaaaccctgctttaaattcaccttgttctgggagatgagaatccccaccttgtctagggaactttcccttccaaagcgtgggtgtgtgtgtgttcacacactcatgtgtgggtggcactctttctgggcacttaccccccatttctgtgcagcattttttgaaaccttatttgaattccatctaccctgggaggctaagagcatcctgaggagagagctctgtctttcctaccctcttagcctggtggactcttcacacaggagcagttgtcccaggtactgactgatggagctgaatgattcccgcttcttaaaaaccttccttagctgctgtccctctacagtgggctcctgatttttcttcttccttttacagcaaagctctgcaaaagaattgcctattcaagctgtctctatttcctctcctctctctctttccctatcaataggaccttctccaaccagactttcagtcccgggcattgatgcccagattgctaaatccagtgatctgtccccaggccccatcttactggacttagcagcagcatttcacatagtcttttcctccttcttccttgaaacactttttcacttggcttctagaccacgccccatcttgttcttgcactgtttctggctattccttctcagtctcctttgctcgttcctcatctcttgatctctgaagatggatgtgcctcagggcccggtccttaaacctcttctctctgcatgcccactccctggtgatctcatgcagtcttagggctttaaagcatcaatatgcttatgactctctaatctcatctgtagctctgaccccttccagaactccagattcatccccactgggatgtctaacagaaactcagatttgccatgtccaaaatcgagttattgattctcccctccatgcctgcttctcctactgtctactcatttcataaatggtaatgccattctatctctgtggacataggctccaaaccttggagtcatccttggtctcatctttctctgatacccacatcctctctatcaacagtcctgttggctctgccttccaagtatatccagtacaacccaactgcgtctcaccacctcagcaggtgcttcccttttccaagccagtattatttctccctggattactgcaaacctttcctgttagtttccctgcctctttcttgcccctcacttttcattctcaaaatggcagcaaaaatgactcttttaagatgtaaattggattgtgtcagtccactgctccagtcctctgctgacttcccatgtcagaataaaagatgaagtcctcacagtggcccacagggcggtccatgaactgccctttattctgatgaattttattgtcatttcctaccaccctgcctctcactcatgccacacaccacccccagctccaccagcttctttgcttttcctcaaatgcaccaagtgtgctcctgccccagggccttcacacctgctgtgccctctgcctggaacacttttcacctggatatctgtgtggttcactttctcatgccatgcaggtcatgccctgaccatcctctagccctgcctctgcccctgacactttctgtccttctctgcttcctttttcttttttttatttttatttttattatactttaagttctgggatacatgtgcagaatgtgcaggtttgttacatagatatacatgtgccatggtggtttgctgcacccatcaatccgccatctacactaggcatttcttctaatgccatccctccccttgtcccccacccctcgacaggccccagtgtctgatgttccccttcctgtgcccatatgttctcattgttcaactcccacttatgagtgagaacatgtggtgtttggttttctgttcctgtgttagtttgctgagaatggtttccagcttcattcatgtccctgcaaaggacatgaactcattcttttttatggctacatagtattccatggtatatatgtgccacattttctttatccagtctatcactgatgggcatttgggttggttccaagtctttgctgttgtgaatagtgctgcagtaaacttacgtgtccatatgtctttagagtagactgatttataatcctttgggtatatacccagtaatgggattactgggtcaaaaggtatttctagctctagatccttgaggaatcgccacactgtctgccacaatggttgaactaatttacactcccaccaacagtgtaaaagcattactatttctccacatcctctccagcatctgttgtttcctgactttttaatgatcgccattctaactggcgtgagatgatatctcattgtggatttggatttctcatggatatctcattttgatttggatttctgtaatggccagtgatgatgagctttttttcatatgtttgttggccgcgtaaatgtcttcttttgcaatatgtctgttcatatcctttgcccactttttgatggggttgtttgtttttttcttgtaaatttgtttaagttccttgtagattctggatattagcccttgtcagatggatagattgcaaaaattttctcccattctgcaggttgcctgttctctctgatgatagtttttttgctgtgcagaagctctttagtttaattagatcccatttgtcaattttggcttatgttgccattgcttttggtgttttagtcatgaagtcttcacccatgcctatgtcctgaatggtattgcctaggttttcttcttatggctagccagttttcccaacaccatttattaaatacagaatcctttcctcgttgcttgtttttgccaggtttgtcaaaggtgagatggttgtagacgtatgttgtatttctgaggtctccgttctgttctattgatctgtatatctgttttggcaccagtaccatgctgttttggttactgtagccttgtagtatagtttgaagtcacatagtgtgatgcctccagctttgttctttttgcttaggatcgtcttggctatacgggctcttttttggttccatatgaaatttaagccaggcacagtggctcacgcctgtaatcccagcactttgggtggctgaggcaggcggatcatgagttcgggagtttgagaccagcttggtcaacatggtgaaaccccgtctctactaaaaatacaaaaattagcaaggcatgatgtcaggcacctgcaatcccagctactcaggaggctgagacaggagaatcacttgaaactggaaggcagaggttgcagtgagccaggattgcaccactgcactccagcctggtcaacaagagtgaaactctgtcttaaaaaaaaaatagaaaaaagaaatttaaagtgttttttctaattctgtgaacagagtcaatggtagctttgatgggaatagcatcgaatctgtgaattactttgggcagtatggccattttcacggtattcattcttcctatccatgagcatggaatgtttttccgtttgtgtcctctcttatttccttgagcagcagtttgtagttctccttgaagaggtccttcacatccctctaaagttgtattcctaggtattttattctctttgtagcaattgtgaatgcgagtttgctcgtgatttggctctctgtctattattggtgtttaggaatgcttgtgatttttgcacattgattttgtatcctaagactttgctgaagttgcttatcagcttaaggagtttttgggctgagatgacaggcttttctaaatatataatcatgtcatctgcaaacagagataatttgatttcctctcttcctatttgaatatgctttacttctttctcttgcctgattgccctggccagaacttccaatactatgttgaataggagtggtgagagagggcatacctgtcttgtgccagttttcaaagggtatgctcccagcttttgcccagtcggtatgatattggctgtgagaccatcctctatcccctcctctgcccctgacactttctgtccttcttctctgctttatttttctataacattcatcatcatctgacatatgggtcctattgtttattgtctgagtcctcccatggggaaaaaccctttgtttagttctctgctgtttccccagcacttaagactgagtgcatggtgtatagtaggtgtccactaaatatctactgaatgaatgaatgatggagacccaagggaggtcccaaaggagctttacatttgaaagcttttggaaggcagagatgggcggtctcacggacacagaggcagcccttaacaagtgctgcttgccgaggactgtgcagtgatgctgctggctccctgtccccatattgtctgatccctgcagccaaaccccaggtcctgaggcaaatcttgttcctatttggaggaagcccaagccagcagtttaatgactcagcatcaacctgagttttgactgttggtcttaccttgtccctcagatccaaacaccaggacttggcaaacacaagtccaccagcgcttgtgtttcccctgcagtgcctaagtcttctcctcaggtctgagacttcactctgatgctctggctgtgcccaagctcctctgggactatggtcagacctttttgtctcagtcttgcaggagcctggagaccggaacctggacctagcatctcagctgggactgcccctggcctccagctctttcctgaaactgccattgttggtagtttcaggaaactgggggagccttgaccagttctgactgtttgcttttccttagattcacaaaatctgcatgctggcagggccctcaagtaactcattcctcctttgaatcattctgaccattggtttttctattgagcctgactctatctctctgtgcctaccgttctagctctgtctgttcttcggggccatacagaacaggcctggtgctcttccctgtgatggcccctctgagacctgcagcaatatcatttcatggctcccggcatcttctttcttccagagatgcaccattagtgcctttgatggttccttccatctcatggattggatccaattcatcaacctggtcaccctcctctaaatcagttttcttttttctccatcctaattaggatgtgatcccccaaatcagaagcaggcactcttttcacctgcttttcatccactataggtatctgctccagcctggtggggatctggcctctaggttcagagccccttgttgaacccattcccacccagccctggctgtccagtctttgggttaaagagagccaatctagatctcgacacgtgcctataaaacacatccccctgccctggctcttcataggttgggctttgctttcagtagccagaagcaaggctgctctttgaaaccactgcagcaggttgcccagtgtctaaaaatcactgcattgaagggccaggtgctgggagcttccctaagtggaatcacctccttggcttcctccaagctgtgttgttcccatcctttctagcacatggtctttgaagcatggagtgacacaggtgggggagggaatgccagttatctagcaacagttataaatttcccttagcggcagggatctaacaacatgagactttgagctttcagctcccagatgaaagaacagggattttcccagcaatgacagaaaagggaaacatatagccctgggggcccccacaggaatctctgttatggagctgctccaagggggcaccaaccacaagcctgagtagaattgcaataggtggccccagacctctgggcagccacccagaaatctcaggcatgcagcctggagaagagggagaactttccagaggccacagttaaggaattttccttgcacctcctggagctgctggagtttctgaaattaaaagggcctttatctggaaattatggttgaatgccagtttcccctgtagagtcaatttggaaaacctaaagcactaaaggaattaagtttgctaaatggaaataagtggagttggtggagatgaaattggatgtatgtaagtgaaatcatctgtggattgccccctttggcgctttccctttatttaaccaacctcttcttcatctgccataggaatgatctcccaaagagcacggtggcccctgggagggtcccataggggaggcagggccaccttctctgggagagttgctgcagttggcttatagttgcagcctgggtgggactcccttctgggtctggagttcacattcaagtcttcatagcctagtctggcctggatccaaaatttgtgtgcctgaatcccacttactagctaagtgcttgtaggcaaattactcatccattctcacactcaattttccatctttggactggagataacagagcttatctttaattgttgcattaattgagaggacacaggtgaagtagcatgcacagtgtgtggcatataagaaatattagtttctatttttttatttatttaaaaaatagtagtttgctcaagcaactggatggcatcatagggtagtgagacaggtgtgggctttattgatgtacaaacctgcaattgaattgcaatttcagcatgtgatcttgggcaaattatttggtctctgtttcctactatgaaatggggataataatactcaccttatagaattgttgaggtttacatgagctaatgtatggaaaataggtaggacagtgcctgacagtaggaagcccataaataatagttattatcgatagttctaccataattattattactgtagttttccattgctgccatgacatattttcacaaacttagtggcttaaataagacaaaattatgatcttacagcctgtaggtcagaagtcttaactgagctaaagctaagattttagtggggttgcattcctgtctgaaggctctaggagagaacctgctcatttgggttgtggatggaattatttccttgtggttataggatggggggccccattttcttgctggctgtcagctgagagccattcccagcttctagaggccgctgcatcccctggctccattttcctcttcctccattttcaaggccagtaatggtgggttgagtcattctcgcctcacaagctcactgagctcagctgggaaaggttctccaatcttaaggactcatgagattcgattgaatctcccaggataagccaggatcatctccctgcctcaagatctgtaaccttactcacatttgcaaagctccttttgccacgtgtcttagtccattttgtgttgctgtaaaagaacacccaagcctaggcaatttgtaaagaaaagaggtttatttagctcatagttctgcaggctgggaagctccagggcgtggccctggcttctggtgagagctttcgtactgcatcacaacatggcagagaagatcaaaaggggaggcagatatgtgcaaagagggaaaaacctgacgggtgtcttgactttctaacaacccacactctcttgggaaggaatccattcctgcaataaatagtcctgtcgcttgagagcaagaactcactcactgcagaacagcaccaagccattcatgaggaatccacccccacaacccaaacacctcctaccgggccccacttcccagcactgccacattagggataaaatttcaacatgagtttgatggggacaaacaaaccatgtccaaaccatagcaccatggaaggtaatgcatttgcagggactgggttttaggatgtgggcatctttgggggccattattctttctacaacaactgttcttgtaatgtgggaggctaagccgctggaaaaccttctcatgagcagttccatgtgcagggactgcacacttggaaactgtccatagctcgatccttggcccaagttgccttactcctgtgatcatcaaccattttgcataagaaccaggcatcccagagcaccgaagctgatgtgtttttttcaatggacagagggaactggacatgttggctcttccattactgcaactgagattatgccaccagggaagagacagctgggaaggggctgtgtaacaggaagtattttatcacgttgatttagtaatctcgccactcctaacatgtcagggcactaaaggagtagcctgagagctgagtgtgatctgagcctgtgttgtgtgggctccgctgggctccgctcagaatgatgtgtttatttcctgccatggggtctagagagaataacatcccgccacagtcccagcagactctgtcttattctgcctgccatccttccagaagggcacagatctatgtgtgctttaagaagcaatgtgatgtaggagagtactgctatgtgtgaagaatgagaacacttaggatctgaagctggtcctgcctgttcctctgttctctggtacttacttaatactgacaatgccctgtttagggctcagctctatggaaaatacaaagaaataggatattttgttggtacatgttctaaatgtggaaaggccagactctcagacatgaaggaactagagggcgatacgaaataaggaagtattaagtgctgagacatcagctctggagttaggcagtggtgactgtggtggtccagggaccgtggggacattgccattttgcgcctccttttccctgtttgatatttcttttgttgctgcctagagcagagtaagagagagggcagtggaccatccctttaagatactgtacatcacaggagaggggatgacattcatgtttattgagcatctactgtgcccatcacttccataagttatatgattaatttttataacaacctccagaggtaggtttggtaatgtctgctatttgggtgtggaaactgaggtgtggagggaccaaggtcacccatgcagaacatggaagatgctggatttgagccagactccctggcgccaaccccatgctctatctattacactagactcctccctgctgtgctcccctctgcagagaccccgaggcctctgggcagtgcctgtggctctggaggtgcaagagaaggtaggtgtgattgaggtctgcccaagacccatgggacaacctccgtttctttagggcagaccccacacctcatcccccttcttgtccccacctctgctggtttccttttcagacacttgagagagaggaactaacttaaaatggaaccacagggttagtgctaaaggcaccgttaggttaaaattgagagctgaggctgtggtgctcagaagggccaagtctgcatgctggctttatttatagtcgcttatttattagattccaaatgatgtttaaccaggaatcatatggcagtgatctttgattacttatgcggctaatagctgaacatttattattattgctatttattcagccagctaagtgtaccgggtgcttctctttcaggaaagcaccaagggaaggggccaaaatagaggagtggcttggctggtggtcctatagaccaggcgaggggctccactagaagggtttttttttttttgttttagtttttgtttttgagacggagtcttgctccgtcatccaggctggagtaaagtggcacgatcttggctcactacaacctccacccaccgggttcaagcaattctcctgccccagcctcccatgtagctgggattacaggtacgtgccaccacacctggttaattttttgtatttttaatagagacagggtttcaccatcttggccaggctggtctcgaactcccgaccttgtgatccacatgcctcggcctcccaaagtgctgggattacaggtatgagccaccacgcctggcctggttttttttttttgtttgtttgtttttgtttttgtttttaaagagccaatccttaaaatagagggaataggggtgggagtgcagagaacaccctaaagggagagaagagtttgagataagagttgggacttctggagctagaaatatctagctttataataacagcagcatttattcagtatttattatgtgccaggcagtatggtaaatgctcttcaaaatgattaatcctaccaccacctccatttcacagatgaaaaaccagaggctcagagaaattcataacttagctggtgttcaaatccaagccctgtctgcctctggagagaccacatgtcccttatactgccctgccctccgtcagagtcagtgcccttcttctcttttggttaagcttaactttttgagtaaacagcccaggaaaagaatggaaaacctagtgcccccggagcccaggaaagagtatggagaatgcagctcttggcttctctgttcttttccccagtgttttgcagcccactgggaaggagctgccagtggtccctggagcatggcccatgcagggccatctaatacagtcctgggacaggccactgcatggcaggcagggtgtctgcctagagttgtgatggtgcagggagcagctgggcagtgccaggcccagaggcaccaagatgggaacctgtagtgtctccaccctctggacacatgaagagagcagggaccctcctggcagggaggacttgtctaactgaacctcccctgcccacctcagacatgctaacctttgggctctctcatgcctcccatcctcactctttctcagttctgtctttgcaggaggaagctcaaactccttttcagggcatgggaagccttcacaggcaggctgcagatgatccaggtggcttcatctttcaacatcgttcccatccctatccctaccgtaaacactcaatacccatgaattctgtactgcagacgctggagtccctagaacatccttgcctctcacatcgctgggcctttgctgtctccactgcctagaatactcttcttctcaccttgcctgcccagcagaattttattcaccattcaaggccttgcttatatatgacctcctcctctgaaggcccttctctgatggccctttcttttcttgagatagagtctcactctgtcacccaggctggagtgcagtggcgtgatcttagctcattgcaactgccacctcccaggctcaagtgattctcctgcctcagcctcccaagtagctgggactacaggtgcgctccagcatgcctggctaatttttatatttttagtagagatggggttttgccatgttggccaggctggtctcaagctcctgatctcaggtgatcaacctgccccggcctccctaagtgctccctaagtattacagacgtgagccactgtgcctggcccgatggccttttctatctcctctgagagtggatcttgccctctctggggctccagtgccaccatatgggtgactgcacctcagcctcaccccacatggcgtggtgacatgagtttcagcatcagtctctcaaggcaaagactatgtctcattacctctgactccctcggccttgctccatagtaggtgttcagtaaacattagtcaagtgaatgtaggaatgactcattcttatcctgggctgctgtggaaaaggtgtttgtttcaattggggccacatactcactggcttgaaaatggggacatcagggcaggaaacagggactaactgagctaagttatgcaacctgaaataggacagcaaagcacctggaacatgctggatagaggcgaagggagctggatatttgtctttgagtttggaagagaggagaaggagaccttggccaataccaaagtaggatttcagggtctctctccaaggaccctcttctccctgtaacactaacgttgagtctctggccttttcagttacggcaaaatatatcatgggcagccactgacctttagaaggaggactgtgtgtgcttggcccagcatcacaggggcccctgcactgcctggccctgatgcccgactccacccaaggaagaccaccccacaaacagagtgggctggccttgggccttttcacctttttaccccattcctcagtgctcttcccttcatctctaagacacagccagtggctgccagggctttagccagatgtcaggaaactcaaagacaggatcatcaaaaagaaagggattggggaggaagactagagagggcctggggtaaggggccagggaggattggtgaccaggaaagctcagggtgcaggagggaagcgcaggagtggggtgagtcctgggctctgagactgtggaatttgcaaggctcacatcagctctccaagcctcagttttctcctcctgtggcctctgaggtcctgcccagcctgggattccatgttcctgtgcggttcctctctctcgaggctgcaacaggtgctgcgcctttagcctccctcctgtccttctcctctgctgttttccctccctctcttcattttgccccgctaagtatttactctccaccctggtctagattatcccctggttaagtgccaattagctgctggctgcctgttcactcagtttgatgcattcggtgaggcacagaggccaaggcctgattttggagagggagcgtaatgagaacagagaacagcggcggcccacttagtttggattttaataaagtttccagctaacctaaatcatccccgtcacaggcagcccagcaaccactgagtcccccaggctgggaacaggcaggaaggggcagaaatgggctggaggggacagagatggacagagccctgttgaagaggaggagctgtctgtagccgagggtcccccttgacagcaggggcagggccatctcagaagtgctccgggtaaaggctctccaaggggaagcataatgcctgctctttcagcagctgttaattagttgcagatgatgagataattcataaaaattagcaatgatttccttcattgtgttaatatcactgggcaataaaactgctgttaaggatgacttttctcagcatcgaggagtgagatgtcaagataaaaacagccctccctggaggtggagggaggaaagaagaaaaaccgagctgctgagacagtgacaggggcagtgatttccaagctttggctggaatcgtcagaaggaagtcgaattgaaatgcaaatcctggtgtctctcagagcacaggctggaaagaaatgcatttggtggtgtcaccttggcggccaatggacaggcagacgggtggcgggagggcttccctgctgctggcagaaggcaagatggtggcagccagaggcccagcgaggcttcacttgagcagggagtgggtctgggtccccaggagagtccttcaaagaggagacacacttgcttatttggcctgtagcatggtctggtcttgactccctccatttgcagctcttgatgctttttctttctctcgccaagttctgcccacactggcctagtatcagtttcttgagtgcaccaagaggcttcctgatttagggccgtatccatgcatgctcttgtctctgtctagaccactatttgcccccatcttttttttttttttttcccatctggccaactcctatttatcctacaggtaaaatgccatttctgcattttgaaccatattcccagtgcccgacacagtttccatcttatacatgggaagtgggttgcatagatatgtggcctcttccctgcttaaacccttccccatgctcacactgcctataggataggatccaagcccctccctacctcaccagccacctctccatggaccttctcaacttttctctgcttgaggatccctgaacatgacacacttttccacctctgtcactacacttagaaggcttttgttccaagtgtctgcctggtgaatgcttactcgttctctaaaacccaggttaagtgtcgtgttctctgtgacacgctccctgatactgctccccctctctcttgttgcttataccctccttgtgtgtcatcgttcctcagagataccttcattgtagcagacttactcactggtctttcctgggcttgctgccctggtttaagagcattgactaacacagagtggacactccataaactgttgcatgaaccgatagatgaatgagtgtaaagctaaaaaaatggctttaggtactatttcataatccaggccagagatgatgttggcttggagggtaacaatggagatggtgagaagtaaacatctttttgaagttgaactgactagtcttggtagtaggctggatgtgaatgatgaaggaaagctcaacaatgaccaagtaggtagccaaagtatcatttattaagaaggggaagaagggaggagagaccttggggtaggggcggggagatcaagaattctatgtggcacatgttaaatgagaaatgattgtaaaacatccaagtatagatgtcagggagtcagatggacataagatattagaagaagaggtcccaggtggcgacataaatggagaatctttgacatataagtggtattcagagccgtgggaccaggccgtgtcctagggagagaatgtctggaaagtggcatggtgagcccaggactgagcaacctaaatatttgctcaaaaaagaaagatttgcaaaatagacattgtctagtgaatgcataatgaactgcaggactaaagtatagaccagacttaaccagccaagacattgtaactggaagtaaagagtggaaagctgtgaagtttgtgcctagggggcatattggtcaatgatgaggctagccatagaaaagtaaagaagggtcttgacagaccagcaggtttttagataaagtcagcacaagctctggagtacccgtttgccaggctagaaaacgttatccctagcaatgtgttggaagattctgaacacagacttgcaaataagtacagaacttttccagaccactaacactttctggcaagactttttttgtttttgtttctctgggaagaaagcaaagtgaggctgggtgtaatggctcacacctgtaatcccaacactttgggaggctgaggtgggaggattgcttgaggccaggagttcgagaccagcctgggcaacatagggagaccctggctctacaaaaaaataaaattagttgggcgtaatggtgcatgcttgtagttccagctatttgggaggctgaggcaggagaatcacttgagcctgggagattgaggctgcagtgaactgagatctcactactgcactcccatctgggtgacagagcaagagccagtttctaagaaataaaaaaggaaagaaatcaaagcgaaacaaatggaatatgaatttgatttaattgatggtcggttggcccattcagttattcatagtatggccaagccattgtaagtcagggttaagaagaaaattgacattatttgatccctaacctctaagagtttgtggagacaatacgaacacacatgaaaagtgaatgacagtgcaagaccgtttagttactttagcaaggcaaaacatatttaagtgttcaatgaatgatgcagactctaaatatatggtaaagagcctaggtgcaggagaattcaccctttctttaccagagtagtcaaggaaagcttttctgtgcttacctgacacggtgattcatcttggaggagtaaataaagatgctttttttttttggagacggagtctcgctctgtcgcccaggctggagtgcagtggcgcgatctcagctcactgcaagctccgcctcccggcttcacgccattatcctgcctcagcctccgagtagctgggactacaggcgcccgccaccgcgcccggctaattttttgtatttttagtagagacggggtttcactgtggtctcgatctcctgacctcgtgatccgcctgcctcagcctcccaaagtgctgggattacaggcatgagccaccacacctggccataaaggtgctttttaagctgtgaaggaagtcagatggaatggaagggaacctctgagtcagtacttctgtggaagatgacatttagatctgctgccatctgtcggtgagtgtggaaaggagcttggagcttagtcttcaggtactggaaaggaaaggtgccaagaggaaccaggtgttgacacctccctctctggaggacaagtgagctttagtctagttcattgtcgttaaaaatatgaccctcagaccagcagcattgacatcacctaagagagtgtgaaaatccaaaatctccagtcctatcccagaggtactaaatcagtgtctgcattttcatcaaatccccaggtgattctcatgttcattaaagtttgagaaacatgggtctaacccttgtcatgtagggctcttctgggatacctcctgggtccgcccgtacccctcacctgccagagattctgattggtgggactaggatgggacttggaagttaatatttttaataggtacccccagatgatgccatcagacaagtgttcaaagctctgctttaggctgttctgttgctgtgccccatgtccctggggcaggccggctttttctccatgcacacacctggacctaggcattcttttccctatcaaactcatttttttgaagaccaccaacccaatggcattttcttggtcttcctcatctcatcccccttcacttttgcagcagttgcagttctgaagctttttgaagctctctcttgatcttggtttccattaggctatggtcgtctttctcagtccttctcttattgctaacaactcctttcttgtctcttttgctgatgattcttctgccctaagccctttgtgcctccctcaccctttctgggcaatcttgtgccctccctggaagtaaacaacttccaaatcatctgcagcgctacctctctccaactccagctgtgcgcagagttcaacatgtgttgatctacttaggctgtagatttcagctgagggatgttgggtaaattaatttacttttgagtctcagtatacctttaaagtgggattaattacatgtgattcaagggattattttggacaccaaatgggataatgtatgtaaactatgtggcacatcgtaagcgcataataaatgttagtttcttaaaaaaaagcatgatacatccatcaatctgaacccaattcttcatacctatcctgcatttttaaagtgtgactttactcataccctgccctctgcttagaatatccatttttctgtctttcaaggccaaactctgttgctgcctcaaccgtgaagtctattatcaacccaattccaaatcagctttcacacaaatacctgtacttctttaactgtgccacttatagtacctaaatcactgtctaccttgtattataattatttaagcacacggtatctttcctaaaaactgaaagttccttttaggccaggctcatggccttacaatagttgtattccccagggggcctcacacagtgcctgtgtaccataccagggaagctcacaagtcctgctggtagtggatgggctgcatcacgtctatatgtgaaggcttgcatgttactctccattaaatatgctaacagagggaagcagtgatgtggagaatccaaataacaggctgtctcaacgttattgccgttggctttggaaagcatttaggtatttctgcttcagatttaccttgctgattatgttttatcggcatacattaatatgagcttgcattccatgagcatacaccacctgggaaactgaaggtggtgatccacgcataggcagagcagcggaaaaagctagtttagggttttcagttgtccagggataattcccaaagtgcgttattaactccaacataagtaacagtgagttggctgttgtgctattatttccctcttagctttctctggttaaaatcctttataataattagtcaagggcacactaattacctgacattgacataaaatacttctggtgatggagcagaagcactgttttgaattcatgctagactattatgataatgataccttacatttgtatgattagtaatttataaagagatcttatgtgtgttatttaattttgtctgcttgacgcttatgtaaatagagtagatgacattatcccatttgacagatatggaaaccaaggctcaggagtgaagcgggttccccaggctgtcttagctggatacaggcagagtcagggaccatgccttgggtcttttcactcttgggttctagtgctttttccactttaccatactgctttaatgaacctccagcgctttaagatgtttcttaatcacttgtagaatttccaagtgattgttttttgttgttttcaatttctggtaagattctttattttcatctattttttgtattttctttccatttttttggaatacatttatcacatttaaagtccttttctgttaacttgtctgtttagatcacctgtgaatctgtttctattgtgtgttgttgttgttttttccctcttagattttggccatatgatcctgtagttggatctgcctaataacttttttattgaatgctcgacattgtataggctgtacctgctgtgatcttcctcaagaggtgttttactcattgctaggcagagtaaaaccaatgatcttaatccaattaaagcctgaactgagtccctgccgggttgtgttttggtcagatttagtttacctctggctcactcctttcccagagcagagccaccattagttgagagcctcctgtgtttactgggtcccctccccagcaggtcctcaattctagtcttgctgttcagtgcctcagaatggccagaaaacactctctgctttatagagactttcggctgagattttttggccttctcctccattcagcttcagaattctgtaaatgacttaaggagaaaattgggaccctatatttgaggaccctcaagtccttaattttctctctctagtcccaaggctgccagagctctgctggcttctttgtcccccagcagcagtctttgcttcttgcaaacctgggttctcagcctctcatcctgggcctagaaatgacataccctccggaagtgattacagaatatcagctcacctcttcacactttcccccctcagtaactgtatcctctcccatccttcttgctccagcaggtcaatggtgccttgaaacagatgattgttatatttcttctagcatttctagttcttagtggaagcattgattggccacaaactatcccaccctaccccgaagaggaagtcagatgcttactattaacacataaaaaccacaggattacaagagcagctcttagctgggtgtcttggtagctggcccagccaactaggagcaaacactgtttaaggcattcccttgagtgtctgggctgcctcaccatgaagaaggcagggaaatggatgggagtgtaactgtgggcccaggaagaaggcattcactgggatgaggaatgagtgttcagcaagcccaggaggcctcgatacttcatcaggtttctaatgattttgtcagagtgttaatcccatgggtgagtagcagcattttgataccagcaaacagattgtgtttcagcccagataatccaatatggagatctgcatgagagccgaaaataattaatcacattttaatggggttgagagaggctagtcaaggatgctttacattggaagtagagcaatgggggtcagaaagggcgtgagatgtaagagagaggttgaacatgggagtagcccatatatatgccagaatggagtgtgcttatggatgtggtatggaagaaagagaggttgtatgtgcagagagcattgtatggatattcccttccatcacagaaacctttctgcaccaggtcttgggaaaacagagataaagaccaaagtcctacccttcaggacttcacagtctgatggtagaggctgacaagtaaccagatgatcaataacaatagtcctaggtgctaggatggaagaaggcccctgctgcattgggagcaccaagcccagtcagggcttgggtaagccacagggatgggtggagggccttccaggcagaaggaacaggttgaggaatagtgctgctacaatattgagataacacggacataattctatggaaaccggaagtttccattgcctctgcccttaccctcgtcgagccttcataacctcttgcctggcaagagcctcctacctgcctcccatccctcacttcttgagcctattctaaatgttgaacccatgcttttcttcccaaaatacagacctggctgttgttgacagcccaggaatttcttagggtttctcttatttatgaaataccaactccttagtgtgcagtatcccttccatgatccagccatacccaccctcctttccttcatcatcttcctccattccctcccaaccctacactgcacccctgttctagagttcacttggccactcagtattcctgtagacaaccagcactttctttgtcccttggctttcttggtggtgttccttgtgcctgaaatgtcctttcctgccatcttcacctgatgaaaagtctaccctttacctcagacccagatcacatatcacctcctttctggaaacttccctgatcctcccagtccaaatgagtcatttctcttctgagttacctgatagtttcctcctctgttaaaataaatcacactctgctcatctcatagcagcttttgtctctgtctgttggttactcccacacccccgccagggcaaactccttgaaggcaggagaacaccctttcatctccatggtctccaccacagctcctttggtgccttgtgcattcctggtgctcgataaatatttattgatcgaatgagtaaatgagtatcgaatgggctttccatgtgttttgctccaggtgtctcttattgtaattaaagtttttttttccttagtcaatttcaggcaaaaagcaacataaattttatgtgaggtttgagaaggactgtaaaagtgatttatggttgggtaggagatctgtgcaaacaggttaggaaaatgctcagagtcagcttctacctgctcccctcgtcactccagaccctaaatgctgaagcatagctgccctgtcgtcctggtgcgtgagtggctttagtgtctggtgttgaagtgctgaataaaaaatgctcactcctgagagcatggtaagatgtttgtgggtagtgttcacatagaatgccctgcagcttgatgttcgagaatgatcttttgtgtgggcttgtgcttctaggcacatctctattgtccagccacattctcccactgcaatccttggcaaagcacacatggggctgaaacctgtgaccctgcctcctggtttcacgctctcaccagctgagcccccacactgcagcaagaactggctgcgccaatctctttttattctaagagtgaagtcgagcatgggcagccaggcagctggagccagggccctacctgtcatgaattggaagccgggtaacagtagttgaacctgcagagtgagaataccacctgagcaaccaagatgggtcccagaggggccatttctcccaaatggggacagcagccccgggacctgtggctttgctttctgatgactttgcaccaacagccaggtgtcttgttccttaccctcctcaccagccaatgttcctaaggcccagatttaactttctcttattttagtttcaggccatttcttcttttaatggtgtcccaagctgcctgaaataattcttgcccttcttttatgtggctctgtctcgcatatttatgggaagttatcacgtccttgtaggccctcgttctctaggttccacatattatgttcatttaacctccctttataggtcaagccttctaattcctttaatcatttttattgcctttctttgcattcagtctccctccttggcttctttttagaacaagaaagccaaaattccataatgtgtttcaagaatggtctgaataggggggcagtcagggacccctgttctggggagtgtttgctgctttctctctgatgacgctgttgcatgtttctcattttatctcggcatctactgttttcaattcacctaccctaaacttcgccttttctgggaatggtcttattctcactgtggccgactcctcaggcctgggatggaggcttgggagacattgagagctcagaagctcagaagttaaggttgggaagattcagggtggaaggaggagggaaccaatagacaccaggcccctgcgatgtgaccagccttgtgcaagacacttcgatgtgtgatttcagggaactctcacagaatcatgtgagatgtagattattgccccatctttgcagttaaggaaactgaggctcagcattgttaaataactttctcaagaccatatagctaataaatgataacacctaggatttggacatgggctgtgagatgacccccaaaagtattttttccactctatgcagcctcctttaaagaaagtaggagagaggggtttgcagtgggagcaatgtaagagtagcatttaggtgagggaatgttttcctcatccccattgaacccaggtcctggagaccagtggctttcttctggcatggcctgaaattttaaaactcacttgatttgttccaaatgcctctccctttatcctgaactttgcttatttcctgccttgtatgcagtggggctcatgtgcctgctgatcccctgccagtggccttaaggggagtatttaggaactgctgtactgttgcctgttcccaagctggatggggagcattctccagtttagagtatgggaattttctccactggtggatgctgccccagtcctttgctgcgcctgattaggtcttcggtgagcaataccctcctatgatgtgcatgtggttggattgcactgaacacagcccctctatgggtgatgtcccttccatctctccctgtgcccagccagccaggggaggatgtgatggctgctgggcccaacaaggcagagtggccaagtgtcagtggtacctggcatgacagttgtcttccatggcacttgcttgggggtaggaagacatctgtctctggggaggtgaccagagcctgtgatgatctggggcaggcccaaggaaagctggctccaaccctccagggcatactcagcaccaggaagatttttaaggctctgcttctcagaattagccccaccggggcacagttactcgtttaaaacctaaaccattgtctttgtgctgagtgctggggatacagagatgggtgagacatggagcttgtgttcaaggagcgagcaggctagtgggggaggtggtgcataaacagatcttgacaattcatgtgaccatggcggggatagagatttgcactgtggagcccgggggtgaggcaccaaacatcccagaacaggagcggtggaggcagaagtggtttttgagagacacgtccctggagctgagttaaagctggccggatgaaggggaaggttgctccggaggagagttacaaggaggacagacagtcgggaagacgagactggagaggaacccaaacgatggagacccggtgtgccttagtaggaagcttgaactttgttttggagaaacaggcaactcttttttttctgagactcagtctcgctcttgtcacccaggctggagggcagtggtatgatctcagctcactgcaacctctgcctcctgggttcaagcaattctcctgcctcggcctcctgagtagctgggattacaggctcccaccaccatgcccagctaatttttgtatttttagtagagatgggttttcaccatgttggccaggctggtcttgaactctggatctcaggtcatccacccaccttggcctcccaaagtgctgggattacaggcgtgagccactgtgcccagcccagacaactcttaaaagaggggttttacgtaaagaggctgtcttggcaatttacattttatgattttattttattattattattattttttgagacagagtctctctctgttgtccaggctggagtgcagtggtgcaatcttggcttactgcaacccctgccttccaggttcaagcgactctcctgcctcagcctcctgagcagctgggattataggcatgcaccaccatgcctggctaatttttatatttttagtagagatagggtttcaccatgttggccaggctggtcttgaactcctgacctcaagtgattcgcctggcgtggcctcccaaagtgctgggattgcaggcatgaccaccgtgccaggctggcaatttatattttagatacatcagcccagcagtaagatgaaggaaacagctttaaagagagaccagttaagagactgttggagtagtctgtccatccatccatccatccgtctatcagttagtcctttcaataaatatttcttgggtacctagtatgtgtcagatactgggaaagtcctgggtatagagaggtagataagaaagacagtctctgcccaccaaaggtgacatagaaaaggtaaggaggcctggacctctcttgtagagcagatagagaaaggaagataaagtaaaaaggccttttggaagccagtttatcaggatttggccatggattggatgtggggtagtgggcatgaaggaggaggcataaatagctcccattttccaccttggagggctgtagtggctgagccgggaggggctcctgccagcatcttcagcccctgagttaagcacagaagcagaggagagcggtgcatttgccgtgtagatgcacctctgagacaagggcgtcaccttttctgtcttaagacagaaaattgtcttagcaccattttctgtcagcccaattgcctttcattccctcctgtagaaatccaggagctgccttgggtgactaggtgggccaccaaccaagggagacattcagcagggggcagatggtgagcttgggtggactgcaagtgcccatggcatctggacgagacgtccagtagacagctggatgcataggcctaaagcatgagggagggatctgggctggaggaattgctttggcattgtcagtgacagaaagcacgagagcagatgaaattattgaaggaagagtgcagtagggaaaagaaccctgggctaaatgtcaaggtaccttggtctgagtcttagatttgccattcatatcctgcgacctaagacaggctcttccgcctctcagccttggaggccctcatctgtagaatgagatgatcagaacagatcagtggtctccaaacttagtttttagtggttgaaccttttgttcaaataaaatcacacacagaatcccaacagcaaaaagtgagctgctctaggaggagaatgacaagagattggaggttgagctctgtttccccacccaccccccaacccaacctctcaacatttcactgcagccactgagggtgctctggggggcatagtttggaaaccagaaatgtgccagcttcctgaggtccctgccagctagcgcctacttctaggagcctggttaacagcccagccttgggtgcaggaggtgaacactgaggcttaggtctcctgggatgcagcagagctccagggggcctgggagaagaggctgtctggagcccacttgacctgcaagtgcccgggttcattgttgtctttcagtggcctgattaatatctaagccctttaatttgcttccctttataaaaagaagaagacaggcaagcaacacaggtcataaaacactgcagcccgtaacacttcccattggctcccgcagctttacttcctcctagattatcattcttggcttcatcacaggaacctgattatttccttttccccttcagagcatttaggaaggtattaaaaaaagaatcccgagcctcagcctcagccagtcctgctgccttctctcactcctttcaaagccctgtgctacttacaatccacactctcaaagagggggagccagggatgcccccagccctctcctcctgctggaggtcagggagccttgggacccaggagcatggggggtgttcattctcacgagctgggctgtttcttgctgtgagtttgccagctatagggccaccccaacatggctgtgagtaggctgagggccttcagccacccatggagcccaagctctcttccagcccatcctggcattgggcagctctcccacccaggccctggccctccctctggcccaggtggctgccatgtcctaccgtgaagggccttctgtggctcgccaagggattgcttcgaagacacacatttcatgcaggcccctgtgagaaagacaaactctgtttccatagaggagtgccagaaaggtttctttgcccatatcaagatgttagcatttcagcgccaaggacacttgaggccacgcttgtcagaactttcatttatgcagaagaagaagaagaggtcagcctgcggggtctggcctacccactgcctcccaggcctggacggccgccacgggtgggaggcagggctgtctttgccttgttagtgaggctgaggtcctgttttgagctgcagcaacagtaggctgacacccctatgaccaaggtgagatgcagtgtcattagcagggccgcctggctggatattgattggccctgcagaggcctggcaggttggcagttggagccgccatgcagataactgagggcagccaaggacccaactgagtgcagcctctggaaggagcaattgaagggacaagaccagagtgggcctgggtgaccttgcacccctcacacagaggcctgctccatggaccagtaggaggagggcccaggctctcacatgcctcctcccaggggcctcgtgaccttctcttcctaggagaaccccacttccaggagcaggcccccagctctccctcctctagcagagggatctgggctgcctgcctctgcaagatggagtagggaccctgggagtgcctctgtcacttgtcctataaatgacaatagagctaacaatatctaattgactattaaaggagaaagcagccctgtagatgctgcaggctaattaaccctgggagtgcagagcgagaggaagaatctgcaggggttgcccgtgagcacatatgcaccgaagtgtgtctgtcccagtggcaaccagggaagagatgtgtcctgtacagcagacttacgctatccacagagtcctgtttggtggattgggtggggcagggcccaccccagctcaagagtccagacttgaaaagagcctcagcctttccgggagagcttcctaggggaggtgaagtctgagctatgttttgagcaaaatggttctagatagaggtgtcagtgggggggcatgtggtagagggggctgtgaagcttaaatctgggggggcccaaggtgagagagctggggttgaagaaggggactcagagctctgagttcatcggtggcttccttatatttccctttggaagagaatagaagcagccagaatggccttggggttgggaaagggggacctggaggaagctggtgccacaggccaggtgagagaggatgagggtctggccaaggcagcggcagcaggggtggaccggagggagaggtgggagctgagggggactccctcaacatggtaccattgccaatgggagcgccccctagagggccagggctctgctctttgcaccctccttgccaaccagcttcctaactcttaggctgtcagagcccagaacaggtccagccccttcattttccagaagataaactgcgctatgggcaaagatatgactgttgtggggcagccccatgtctggaaccctggcagccagcccttattcagtgtcctcgttgccacaccccatgacgtttgttatgtttcttcttatgaatggatctgcctctgcctcctcagctcatccttcaacccgttcgcttcccagctcttttcctctgccttcctgacggtatcactccagttccaccccaggctgctccgccctgcctgtggttcaacatgagttacgcagtaggttctattcttgaaggagggaccatgagagagagcctttggttggctgtgctgattcaggggaacagtggcagacagtcctcagcatcagctaaccccaaatcctgaatgccccctgtgttggaagtgagtttgctaagtctgacctataagagtttatggagctgggcgcagtggctcacgcctgtaatcccagcatcttgggaggctgaggcaggaggatcacctgaggtcaggagttcaagaccagcctggtcaacatggtgaaaccccgtctctactcaaatacaaaaattagctgggtacggtggcatgcgcctgtaatcctagctactggggaggctgaggcaggagaattgcttgagcccgaaagacagaagttgcggtgagccgagattgcaccattgcactccagtctgggcgacagagtgagactctgtctccaaaaaaaagaatttgtattcctttagcacagtggatggccagaggaaaggtagcttctgaggctccaaatgagctagcaatgggctgcagagctctggtggcttttatgaaggcatgatccgggtgtgttggcctctgcatactcctagggcgtgatttatatggggacggtgtggagagttggggctgtcaaggcagggctggtcctttctggggaaggctggcagtggtgaagggaagctagagtggcctcgatggagggtcacagctcctgcacctgccgtgccgtcttctcacatcactgatgcactgctccttacctcctcctgctcatagaagaggccactatctcccctttcccgagtctctgggggtggggtggcgtggtttggccagagctaaggtgacatcaaggcaggggggcagtgtgccaagaggtgtcccccctggctttgtgtggtgtggcgtttctccactcaaccctgtccattttacaagtgttttgaaaaaacctactttactctgtcaagatgaaacctaaagagagtataacgtttctacatacatgatttttaaaatatttaatgtcctaaatataatataaaggatgaataaaaagaaaataacataataaaattaatttcaatgtttaaatccttgggcatcactacacataacagggtgaaatatcccgagtttccagaaagctccacagggtccctgttaagaactaatggctttgcattaagagaagtttgggtctgtcttcagccactgctggctgtgtaaccttgagcaggtgagttaccctctctgagccctgggctcctcataggtaaattgcacagaactatggctgccccttgagtggatgagaggcattaatgagatgcagtatctttaagttctttacacagggcacacttttcccctcccactaccatctcttagtaatgttcacaatacccttatgcctcacctttgttctgtccttcatctttgaaagcgattttgcctccatcatgccatcacggcctgctgccccttccccctggctctgtggcttcctgtgctgccagtttgcagtgcagttcctgctgcctccctgccctggagttctgcccccatcctctttgcactcccaagtctctgactttcctggggtttgtttggctccaccacccagcagggaggcataacacagatcttaggagcccagttacccccactctaagtgcaaacatttttctctatttttggtgcattagattaatcaggagaagtgggcttttggatttcgttggtcccctgtgaggcctagctccaggtaagtgtccttcataaatgtttcatcactctccctgccataattgttaaaatggggataaattctatctggattcagggatgatctcccacctgtgtctgtttgcccctgtggcagctcccctacacactgcatctctcgtgtcatatttcccgttgccactggatggtgatagggccagctgcttcagttcatcacagctgcgtgtgagcctctggcccaggtggcaaggcgaggccagcacactgcccacctacctgccttgatctctcttggtggctcgcggtcccagcactactcctccaaagcctggatcaaattgtctgctttaaggaaagatcaaactagctcctccaggggtcctgctcttgagcatggagggctggtggtcacagccatgactgtaacctgcacagccccatgacaaaccaagtctttagttccatggcctgcagtctttagttcattctacaaataaatatttatttcctgctacggaccaggtactgttctaggcactgagcataaattggtgaattgaaatgaataggaatccctgcttcatgaggaatataaacagtaagtcaggtgtgtgtatgtgtgtgtgtgtgtgtgtgtgtgtgtgtgtgtgtgtgtacccatatagtctgtgactgataagtattaaagagaaaaataaagcaggaaaggtgatagggaatgtccaagggtgttaacattgtagacagggtgggcatggaaaacctctctgagaaagtgacatgtaagtaaagacttcaaggaaatgagagaagagctgcacacatgtttggggaagaagatattggagagagggaacagcatgtgcaaacgtgcagggacccagaggcaggaatgggcctggccagctcggggcatgcccagggggtccatgtggccagtttgtatcagcaagggccgcagcagcaggagatagtcagagatgtaggtgtgaaggtcaaaccacaggggttctttagggtaaaatgggaaccaggtagaacgtttgagcaaagtaaggccatgattggacttcaaattttttacagaaataaactttattgtgtatatttggggtttacagcatgttaggagatgcgtagagatagtaagatggttactacagtgaagcaggttaacatgcccatgatctcatagttggtttttttgtgtgtgacaggagctgctaaaatctacttatttaacaaaaactcctactatagttacgtgccacatcatgatgtttccatccacaaatggccacatatatgacaaagttcctataagattatattactactttttttttttttttttttttgagatggagtctcgccctgtcgcccaggctggagtggagtggcatgatcttggctcattgcaacctccacctttgcctcctgggttcaagcgattctcctgcctcagcctcctgagtagctgggattacaggcatgtgccaccacacctggctaatttttgtatttttattttttattattactattttttgagagagagtcttgctctgttgcccaggctggggtgcagtggcgtgatctcggctcactgcaaccttcacctcctgagttcaagcaattctcctgcctcagcctcctgagtagctgggattacaggtgcgcgccaccatgtctggctaatttttgtatttttagtagagacggggtttcaccatgttagctagactggtctcaaactcccgacctcgtgatccgcccactttggcctcctaaagtgttaggattacaggcgtgagccactgcgcctggccaatttttgtatttttagtagagacagggtttcaccatgttggccaggctggtgtcgaacttctgacctcaggggatccgtccgcctcagcctcccaaagtgcttgggattacagatgtgagccatcgcagccggccatattactgcatttttactgtaccttttctatattttggtgtgtttatatacacagatacttaccactgtattacagttgcctccagtattcagtacagttacatgctgtgtaggcttgtagcctaggagcaatacgctgtttcatgtagcctaggtgtaggaggctataccatctaggtttgtgtaagtcactctgtgatgttcacacaatgactaaatcaccaaacaaagcatttctcagaccgtatcccattgttaagcaatacagaactgtacaatacggttttattaactttaatcttcattttgtacactagatctctaaacttgttcttcctatatctctgctattttgtgtcctttgacctgtatctctccaattcctacccctctaccatgcccactcataataaccattgcttccttctctgtgagtttgagctccttttctaatattccacatttaagtgagatcatgcaatatttctctttctgtgtctagcttatttcacttggcataatttcctctaggttcattcaggttgtggcaaatggcaggatctcctttttaagggtgagtagtatgccattgtgtacacataccacatcctctttatccactcatccgttgatagacacttaggttgtttctatatcttggctaatgtgaataatgctggagtgaacataggagtgtggatatatttacaaggtgattccatctcctgtgtgtatatacccagaagagggattgctgcgtcatatggtagttctatttttaatttctttaggaacctccatattgttttctgacttagattttaaagggatcactccagttgctgcattgagaataggctgaagggagatccatttaggaggctcttgcagtaatccaggtgagagaggttgctggcttgtccaggatgcagcagtaaaggtggtaagaaaggttggaattctggatagattttgaaggtaaagccaacagaatttcttgatggtctggatatgagatgtgtatgtgtaagagagacagatcaagggtgattccaagctttttttttttttttttttttttgagatggagcttcactctgttgccaggctggagtgcagtggtgcgataccggctcactgcaatctctgcctcccaggttcaagcaattgtcttgcctcagccacccgagtagctgggactacaggtgcacgccaccacgcctggctaatttttgtatttttagtagagatggggtttcaccatgttggccaggatggcctcgatctcttcaccttgtgatccgcaggcctcggcctcccaaagtgctgggattacaggcgtgagccactgcgcctggcgactccaaggtttttaccttggtacttacgagggtagagttggcatttgctgcagtagggaaggaggttgggctggtttaggggtaagaggtgtctgagccgaatcttggtatgccaaatgtgagatgcctgttagacaacctgtggagatgcagggtggcagctagaatgtgagtctagagttcaagtgacagaattctactggaaacgtaaatttgggagtaatcaatatacagattgtacttaaagccacgagactgggtttgtacagacagagaagaggacaaggacagagctcgggggtgctttgaactgaagaggtcagagggatgcagaggagcccatagaggaggatgagaagcagcaaccaaggggcaggaggaaagctgggtcagcatggtctcctggaagccaagggaagaagtgatcagtgtcacaaacctcttgagaggcccagggagacgaggactgacaggtgggctcactgctctggagatttttgtttcactttgtttttaatgctccacattaaaacaatatcccatgggtcatggcctgaggacgtttctatctgagtagagcttgaggcttcagccctgcagaaagcaggaaggaagatgtatttgtatcgaaaagaaaaaaggaagttaccagcacacttttaagttcactgtcttgttttatttccataagtccttttaggggagtatttgtagtgctttgcccaatttaagatgaagaaaatgaggtgcaaaaaagcaacatagctgcctttagttcagaggctttgaaatcagtgttggtcaatagaactttctcgatgatggcaatgttctgtatctgctttgtccagcattgaatctgtgggctacctgtggctactgagcacttgaaatgtgactttttggctagtttttaaattgcatttgacttaaattcatctaaatttaaatataaagagccatctgtggcaagtggctaccttaatggacagaacaattctaagtggtcatatttacactagatttaaacctgggtgttctgatccaaggcctggggtctttcaacctaccctctgcttcccaagaaggtagcataatgttctaaagggggctggattggcttgaggtgatgagtcttggagggtggatttggagaaggagataatgtatgtgacctaggcgtggtctaaagttctagggtttattagccagtttacaagctctctaaagtctcctgaagcctgtttcttccactgtcagcccaacccaggctgtaaggttgggcttacaggagtaagggtgaggacccaggagtaagggtgaggacaggagggtatatctagtatatgtaccacttataaatcctaccgtctgtcaatttccttcatgaaacttcccctgtccactcagccgtatctcctgagcagcaaatcatttaaattcctttgaaatactgttacttaaacttgtttttggacacttagattgtacctattattaccattactatttcggttgtgtctgtgtgctgctttctgaatctctttataaactcctggaggcaggtgaattatgtcctgtttcctatacatggtaggtacaggatggggtggtataaagagcactcgtcttgatcatctttggtagcactaaagccaagaatgatgcttacaaaattgtgggacctcaacagatgtctgtttaataactgaatggctaaacttagaaccacatagttttagtttagatttctgagtttccgttcactagctttgttgccaaaggcgaaaaacgaaactctttgaaacccaatttgctcatctgtcaatttgttcatctatcaaaagcagtgtatttcttgtgttctcgtgagggtcaaatgagataataaccatagaagtttttgcacagtgcctggcacatagtaggtgcttatttattaagtgttaatgtttctttacttttcttatgatgatatatatgcggtttattcttcactagactgtggtcttatggcaaatggggattgtattttactcactgttgtcctccatagcactcacacagtgccctgagcatattaggttcttaggaagagctattggatttattgcttgctggatacctctggtcgcagctcaggagatgcagctgaatgagacatgacccagggccaacagggaacatttgggagtgcccaagcttagagcagtcacagcctctatctcagcttcgaagcctgcacgtaatttacagtctcattccttctgtttctcaagtggccatttaaattctttagattgcagggctgtcatagataattcctctactagaatgtaagctctgtgaggatagacatttttgcttgctgttgtgtctagaacagggctggggcatggtatgtggtcggtaaatgtcagatgaaggaatgaacacaggtggggcatgggaagcaatattgtacaacataactctgcaaacttttttttttttttgtaaaggaccaaagagtaggtactttagacttgtatactatagtatctctgttgagattattaacctctgccattctagctcaaatggagtcacaaacaacatataaacaaatgagcaggtctatgttccaaaaaatgtactttacaaaaacaggtggcatgtggttttccagttgtcccagaaccatttgttgaatagactgttctttccctagtgaatagtcttagcactcttgccaaagattaattggccatagatgtttcagttttttctggactctcaattctattccattgactgtatgactatcctatgccaataacacactgttttgattactgtagctttgtagttagttttgaaatcaggtactgtgaatcctccagttttgtttgtctttttcaatgttgttttggctgttcatagagtcccttgcaattgtatatgagtttgagaatcagcttttccatttctttcttttcttttttttttttttttgagatggagtttcactgttgtcttgcaggctggagtgcagtggcacaatctcggctcactactgcctcctgggttcaggcagtttttctgcctcagcctcccaggtagctgggattacaggtgcctgccaccttgcccagctaatttttgtatttttagtagagacaaggtttcaccatgttggccaggctggtctcgaactcctgacctcaggtgatttgcccaccttggactcccaaattgttgggattacaggtgtgagccactgcacctcgcccagcttttccatttctataaaaagccactagaattttgataaggattgcatggaatctgtagatcgctttggggagtatcgccatcaaaacaatattaagtcttccaatccatgaaaacgaaatgtcttttcatttaattgagtcgtctttaatttctttcagcaatattttgtagttcttagtgtacaagtcttttacctccttagttaaatttattcctaggtattttgttctttttaacgctatcgtaaatggaaatatttcttaatttctttttcagattgtccgttgctggtatctagaaactcaactgattttggcacattgatctcatatcccgcaaatttgcagaatttgtttattagctctagtagtgttcgtggattctctgggattttctggaggccccagcatctcaggctcctgtctgacattctcctttagctctggtgaggcttccaggacattccactccggcatatcaccctaaacactagaagactgctttccagcatcgggcctgctcttgagctttctagagttccagggaccctggacagccaccatgaccaagtccattggatgtcagctcaggagagacacaggaacctcttcctgcctatttgcaggagtttgatggtctgtcctgaagtccatggctctcctaggaaggggctgtgggttctaggactgaccctgatctctgcctgtaattctttctaacacatttttatcaccaactccacccatagctgccctatgtagaacagatttcttgtcttgtctttgtttagacccagtttcttctggactcctggctgatccagcctgagtgctgtgtggccacctcttccattccgactgcgttggcatgcctgggctctgtgagtgtgagtgtgcacgtgtggatgtggcatgggggagcatgtgtctgccctgtgtctctcccctcctgcaggcctggagtccttgcatggagcccaggggtgagtcatgtagagaatgggatggatggctggacttccaggtgaggggctgttggtgggtggtatgctctgacattttaggggcacaggggaccccttaaaggactgggttgatttctggcctagaaaacgttcgacctatggggatctttatcacctaagacatataggtagtctgctgcatgcagtatcaaagcaatatgtgaggttgagagaagggagcgtatgaccaagaccaagctgtgagtagggatggcaactggttctcaccccctctgtagctgctgtcccagcaggcctcctaatttcaggtccctagtctgcagatgcacactgcttggtggctgtgtctcctgcaagtactgtctttatttgttaggatcaccatatgaacggactgacagtgctgacagtggtgccatggtgctgtgacctgataccatgtcaggcaccatgaaaagagcgaatagctaccaatcctctctgacttgggccaagattctgcagcacctcagagctcctgggacaaccacacagagcctttttgttttcatcaacattgaacgaccaggcttgaatgagctgccaggacagggctgctcaggaggatacggcagtgtgatggccatttacagaggcctggaggcaagaagacagagaaagtaatgagacaagaaccctgggaagccatggaagggaggctaagtacatgagtcaggaccacacactgtgggagctggagccatcgatgtatcagtgtatcacttcactggctgagactcacacttgtggccgccagtctgccaggcacagccagtctgctgagggtgaaccattgaggggaaggtctgaggaagcacctgccagtgcgggtaaaatcaattctgaactctgtcccccagcagatcctgcacatttgtgtgtctacacatggatctataaatccatgtggctctgtaacctcagagttgccttttgatgactggcaagggtaaagggagtaatcaagaggctggactcccagggcctaaccaaactgtttccagttgtctattactctataacaaatcatctgaaaatataatttaacacagcaacaatcattgatttagcttacaaatctttactttgggcaaggctcagtagggaagattcaaaaggctaatctgtgctccatgtagcatcagctgaatgggcagctagacagggagctggaggacccaagatggcacagttacatggctggcaagttggtgctggctacaggctggaggtgctgtcagaactgagggtcaggggtctttgttcctctccacatggactgctgcatgtgggcccctctgcacgctacttgagcttcctcacaacatggtagctgagttctaagactgagcaacccacaagaaccatgcagaagctgttttgccttttttggctgacctaacggaagtcatatagcattacttgcaccatagtcacaagcccacctaggttcaagaagggggatcatagatgccacctcttaatgggaggaatgccagagacacatcataagaatacctgggatgggagatagtgtggtgggtggtcattttaggaaaacataataccatctccatatgagccatggagaaggaatggccatattttgacattaccacatacttagaaccctgagggacttgtagaatggcaatgggacaaggataagatgctgaagaagtgaatcttgccatgggcacgtggaaagatcctaactgtagcgcctgatgtgtttctaccctgggtgtggtggtgggggcagcaaagcttttgatctgcttccttgatgtctgtgagagaccatttgtgagaaaaatacatcccctcccacctctagctcagctccacagaggtccctaatgaataatcctcatcagagagagaccagaaatagcctcctacttaacagccaggcagagacggggctgagtgtggggctcggaggtgctagccctggcagctggcaggctggtcagtatgggtatttttccttttgcatctctgggccttggaacagagccacatccagggagatgcccccagcctggtgctctctaagggaacgtgaacgggctccagaggacagaggcagctgctggttccagaaatgaagctgcccgcctaaaggttaattaccctcagtcgggctgggccagaacgcagttgccgagacctgctgtcttcctgatactctgctctcaggctgcaccagctgaagtctttgctttgcgcagggccctgctgctgggaggccaggactgctgcacagagacacttctcttctgtctcccacctcttaccccctcccgtgctgttggaggttggtttttgcttgcaggactccagcaagccggctggctgctttcgatgggccagagcataagcaaaggcagggcagtaacctttacctggtctggcctggagacatttataaaacccaagagcttggggacaaactgtatggatgtgagatgtataaatagccctcaggagaacctgccaggtcaggagtccggagtcctttccaaggcatatttttcaaagggagggccaaggatcacctatttaaaatcttacctggagactctattaaaaatgtagacttcagacctactaaatctcaaatgtctgaatcaggcaacccagtgagtcacaggaattctaaagtttgagacccacttcttgtccctaccctcatctagaatgctcattctagatctagtttctacccccaatctcatggcagttccgctcacctccgttgagcacctgctctatgccgtgtgttgtgttacatgtcggagacatgaggataaataagacatggtacctgacagggaggggatgattgctttcagaagtccctggactaagttctgtcatctgaaaataggggttcagttccccagcccttctccttatcttctactgcagttttggagttacttcctgagggattctctgcaaatgctgactagcttatagaaaataaaaggtcagtttgataggagtactggagaattggtgccatctggttttgcaatgtgggattttaataataaccctagtttacttttatatgacacctctgactgtccctgcaaatagactattctataagtgtttgttgcatacactgtgtatgctttggacagctgttcacccagttcccaaagcctcttcctttttgaggctcttttaggttttctgattataccaaagagagtcccagtttttctgaactaaaaaatcagagtagtgtagaagacagagtcctggacaaggaataaaatggccgggatgctctcagccacctgtgagactcagagtgtactgttctgtctgtattttcccacctgccacattaatacatcactgtctgcatcattgggatcaagtagctaacgcaggcgagggtgctttggaaaccaagaagcagccacgcacatacaaagcatcgtgattcataaccagaatgctgtaccttggtttcagagtggcttgtaggtcccagttgaacagtagtcagcgcgagacaaggcagaaacaaaacgaaatgactgacaccacgtcagatcttaagtcctggatccacaaatacagaaggttccctgtattccaattaatctttctagtaactcggagaaataggtaggacagacttatctgtacagtaaggagattgaactggatattttctgggacctgttccatttttacaatagaacaattctataatttgccagatgagaaagctgagatgagctgggccgagtcaccgggaggttaggaggtctgactgagaccacatggctcctgcatggcagaagtcaagatacagttcggacctcctggtggaccccaggggtggctcttctgatcgacggcactgactcactctggcccctctgtaaccaagtgcatataggctctgagtctggcctgctctgtgggcataacggcccccccattccagctgtgtgaggcagcagtggtgcgggctctttcttctgggcacgtgactcacaatagagagtctttcttcacagattggaatgcgccctgcggtttttctgtgcaggggtcaaaggcgatccctttctccagggaagaaagcagacctcctccagattctgtgcccagagggcctggggcttgaccttgagccttgcacatcgccctgctcctctctgagctgctttgctacctcaggaaagcagagtaagctgttgctgcatcaccattttaaatgttaatgatttgtattattttaaaatctgtttgtgtgcctggaggcctctttgccagaggcccagaaagtaaggaagtgggtaaataaattaactgggagtcttcagctgactacaaaactgtcattcccagaaggcagtgcagaactggagcaccaggcggcccggccagcctcgcttgcccctgtgaggtggggagggggtgtgagcagctgcagggccctgctctcccattccatctcagggtgggccatgcagggtgggccatgctgagctgtaggagacagtgagctccaagtcagtgtctctgatgaatcctgcaccacagcttgttatgtcaggaaagcgtgccttcctcgagagacatcaaatactaatggcagcagtggaggcagagggtaaatgaaagcgagttataaatgttccttttaagggcaacagtgggtgagagtagaatgagcatttcaagagcagagcaaaggcattaaaccttgggtcttaactttctcagtgggctcaccaaggtgggacgagatgttcctcgcttcatctgctgccccaagtcagagacctcctggtgcccatcacctgcctctgccacagcccaaggtgtgcagagagaagcaaattcatcctggcgggacccatccccctggtctggggatcagtgctgaggcacaccctggcatgggtcatgcttctcttcaaggggtgtctctcaggatagcccaagttcaggaggacaggctctttcagaatctaagagcagagactcccaaggcagaaaggggcctccaagatcctaaccaatctcttttgaatctgtagccacctggcaaaactataccaaacagattgatccttaatgttttccagaaaagaacttcccaaaatgtccattgcaggatgatccaatagaaagagggaagctaatgtaccctgaacctgcagaaggccttttgtggctggagagggctggaaatttctccccagtgccctcaggccaggacagaaaggctttaaagctgacgtgtagcccagaggagacaggaggtgggttctgtacgggatgaaaagcttggaagtcctagcaactgaatcctacccattccgtggtctgagtagcttcattaagaatccaattcattcatatatccatgcactcaggaaatgattattatacactgcactgtgccatgctctttgtgaggtgctgtggatgcaataatacacaaagcacacaaggtcgctgcttcacgcagcttacacccagcagggaaattaaatggacatgtcaataaatagtgactgtaaagtaaggtgaatactccactagcacacatacagggtgctaagggaacctggggtgcaggggcacccagcctgcccttgggggtagtggaaggcttctcagaggtgatggagaagccaggtcctgatgtccagccatgcggtgtgctggggcgagggttgggaagagagggggaaacgtgacagaaaatgagaccggacaggtaggatttaagagaggaaaagaaaccaggcctgctggcctaggaaggaccttagccaaggcagtctgtaaccattttcagctcctttaggcaaatctccctcaaacttagtcattttttgccttccagaggcagtgtcaacagaggtcacccacccttctgtgcttttcttctaaatttatcctctgaccacgcacggtggcacatgtctggaatcccaacacattgggaggccagcattggaggatcacttgagcccaggagttcaagaacagcctggccaacatagtaagaccctgtctcttaaaaaaaaaaaaaaaaacttctacttaaattctgccagggacagggagctcactgcctggtcgtcagtttttcctaatgttgagtccaaatctcagccttatcactcccttctgctggccccggttggccctcctgggcctagagaaggaagactccagattcttcacgatggccctttatacacttgaagttagcaaccacattacttccgatcttctcttccttagaaggagtctttcctgccccctcagtcccttcttatgtgatttgatttttacccgtgtcactagcctggatcccttcttttgctggtctgttattgtccttttgaaaggaatgacaataactggtcacagtttcctgcgtgagcctggctggagtggggatgagagaggcagtgcccaactttgagacactctgctattatttacacagcccaaggttgcacttttttataagcagcagtttgccacagctggctcatgtcaagcgtgtggttctaaaaacaaatgaaaaaacaaagctcatgttttcctcttttaataaacttgtccaagtcaagtgtccccctgtttataggtctgctgtatttcttgaatccaagatttcactggattggtttctctcagcgttctattctgctgttcattggttgtttggattcggccacctgacatgctaagcacaccccctcccagttttgtgccctctgcagattttatcagcatgctctgtgggttgtcattcctggcacctgaaaagccccccgaacccaggcaggtaaactccataaagagagcaggaggaagacagaggggggccacccttgcgtcactgacattgggctcttcagtcattgtcatgttgtaattggcaaatgcagaaagcaccagcatgttttgtgcttagagctctttaccaggcgaggtttaattgcaatgggatttatgaccgtagcttgtaggaggtaatagatgtagctgtgtctcttttatcttctctggctacagaggattttttaagggaggaggaaagacaagtggggctggaactgggaaactcggtgaggtagagaggtggctacgagggacttgatgagtcgcagttgctaaggttgccctaagagatgtacaacatgaatattcatagttctgttcacttaggtgactgctttgctagctttatctcttcacagcagctttggaagatagggaaaggaaggctcaattctccattttacagagggggaaattgagtcgagagtggatttgctgcggattcaaagtcccattgagagtcatgaatagaattggggctggaatcaggtcttgtgctctgctcttcctaccatagagcacctgcttctccagcattattcacaggatttcatcctggctcatcactcattcctcttccatcattatttaagagataatgtctatgacagcacattgtaaactaaagtctaaaggtgctatccatagttgctgttgttatgactgaggacttagctgtgtcgagacaccatgtggatgcaaaagtgtatgctatgctctcccagcctttcaatagcggtgactttaataatgtcgggaattcacccagtctggaggctcattgtgacttacaatccacagctctggggttttggagaaaggaaagtgctagtgcgtgtgattattgcaagccagagtaaagatgaggggctttcagaaggaaaggactaaccttttccttcctgccttccctttcttaatccactcgcgctatttattttttctttcagcagttatttattgaacacctactgtgtgccaggcactgagccatgtgctatgaatctagtggtacatggggagaagtggttttttgcttcttggaacttaaatctcgtggaggttagggagaggacacagaagattaagcacttactgaaaagtatcaaatgtgtcctaatagaggaagtttgaagtactacagcgtcccatagcaaggccctgtgacctggtctgggagttaaggatggcttcctagaggaaatgactcaagctgagactggagtttaaataaaaggtagatgttactctagatgaaggggacatggaacagtgctttttcagggcctgagtcaagagagaatatgattctttttgaaatgtagggagagggggaggtgggaacagatgagcctggagaggtaggaagcggtcagatcataaaggctcttaggagtcttgttaaggagggttcggctttagcctagtataagggaaagctactggagagttacaggcaaggagggacatgatcagatttctattttggagagactcctttagctgcagagtggcaaatgcatgggaggaagcaggtgtttggtgtgggtcctgctgattctgaattgcctctgggctttgcactggaggtgtccaccctgtaggtaactaccttcatccgtgggactggagctcaaaagacaggtataggctggaaataggaattcactgtatctctgctggcaccggggcactaatgcttatcctgggccaggtgctgggattcggcttatctgtggagcaataattgaagccaaggatatgtgtgatcaagggagggagaaggggccctggggcacagtcccgaggagccccaacctacgagggcaggcaagaaagtcgaccctgcaattaattcaggaaaaggaagcccttttggaatcacagacctgtttgagcatccgttgtcggaaagcggtgggtcgtgtctcataaaaacaaaaaaacaaagtaaaacgaaacaaaagcaattggaagctcatgaacccccctagaggttgttctgtgaatgcagatgaaggacccctggcctaaagtgtgttccacccctccatgttcctttccttttctttcctgtttgtctgattccaacgctccctctctctcctctttcccctccatgtttccttttctagacattcgttttccccaccaacaccttcccagtcaggtatggagaacgacatttgcaaaaggcttggggattctcaaattcctgtggccccaaacctctgggaagaaaacgtcccgtgtttgcagcttcatttcacaccaggccacgtgggcgccacacccgctcccttttgtggggctgctgtactggcggcaaatgttcccacttttgagatagaactggggagactgaagcagaaaataggacgcagcctcctctgggttccagccttaatttaatttaaatgaattaaacatattcttcctgagccccttcttggtggaaagcacagtggattccaggtgggggaagtcacccaagcaaaggctcatcctgagcagagagtgggcttctgtgtagttcaggaactgggcatgtgggcagtgggggaaggcggctaacaggcaggctggagcctgatgtcagcactcctaaatgcagggagggtacggagcctccactgttctgtaggcaatggtgagctggctaaggcttctgaactgggagtgactctatcagagctgagaagaaggaaccagagcttgatttgcagaagtccagacctggatttctgtagttataaagctcattcactacctgacatgatttttttggggggtgggtgggcgggatggagtctcactctgttgcccaggttgaagtgcagtggcctgatctcagctccctgcaactttcacctcctgggttcaagcaatcctcccccctcagcctcccaagtagctgggattacaggcgcctgccactgtgcccagctaatttttgtatttttagtagagatgaggtttcaccatattggccaggctggtctcaaactcctgacctcaagtgatccacccaccttggcctcacaaagtgctgtgattagaggtgtgagccactacgtctggctacgctctatgtgaattgagtgactgctatgtgcaggctcagagctatggtacaaaaggtgcaaagaaaactaagatgcagtctctgccttctaagtgttggcagcctggctggggaagcagaaactgagtataaatagatgaggaggaatcccaggcccccagcacccctgacctgacattccctctgcacaggaatccttccagcagtgagagaagaaggaattcttctctccctgaagtttccaggagagacagccttttccagctgccaccgctctgctcatcagagtgctaaggatggatccacaggagagggtggttctgcagcatgattgtccctgaactccatttatcagctcagggccctggtaataaaatctatttgcacagccatggactgagaatttagctcagatggttagagagggcgtgcttagggactaggatccaaatcctttaaatatttgctgtggggatgtcttcatacccaagaggggaaaggatgctgcggcggtggctcctcgtcgctctgacaggcagtttggggtccagccaggagatttttcctgccgacggaatgcctgtaaatggaggccaggtgccctgtgctcatcgcggaactggttgcctttggtcaccttagtgtgagcctcaggctggggtcacagccattgcaaggtagctaatggctgggacagaggaagcaactgcacacacctgggtggtgggcaacgctgcaggaacaggctttcagaagggcagctgctgtggggcatcctttggcaatgtttacagtatcacgaggtgagatgttactgccccctggggcttcttccctacttctcctgtcccttgaacctgctcacaggcggatgagcatgcccaggatctggcagtgcttagggattggagaaggatgggcccactatctcctttgccatcctgccaacacacatgtcccagcctgcatagaaagacaccgcagggccaggaaatctgagtcctaaaagtttaaaaaaaaaaaagcgatgggagaacttgatttgtgatgttggctgtatcagttgacctctttggtcctcatttccttacttacaagaggggaaataagaatcctcctgcttcctgcatcaccaaggtgaggagaggagactacatgggatgaagaaagagagggcttgggtggggaaagcctgctgggggtgtgtgggattctgatcagggaagcccagccgcccagcctggggtgcccttccagctctgggctttgtgggcaggaatgtgctctccctggagctgaggctccacgggcttaggcctcctggaggctgagcagctgggggatggggagacctcccagcaaggctggggtaggaaatggccagcctgtacctccctgcccgcgtctgtaagctgaggcggctgtctgtggcaagagggcttgaaaagattccgaaaagaattaagtcagtgccatggttttccccttaagtgtctgtctagacacaacacctgattccaggaaaggatcataagtccatttgcttgttgctttgggtgctgagaagcctgacttctccctcctgccatcttccctctcttccagggtgttcctccctctcctcaccaagagcaaagacaggactcagccctggagttcctaatatgtcccctcaagtctgtaagtccatcagggacctcccagccactccctcctctccccgtctttacccaggctttctggaaacagcagaaaaagctccaactcccggtagcctgaggagtgatgtgaccagcgtctctgagtcatggaggcatccatattcaggagaggatacttgccagtttccattttccctgaggacagagcaagaagagataggcttaggcagccgcaagtggatttaggctgggttagacaagagattggtgtcgctggataataatgtggttccctgccactctcctctctagcgttctaagccagggacacttaacctccagccgcaagtacagccttgccccggcatgggaccaatcctgtccttgagatggaaggaaggagggagaatccaacatgtattgagcattgtctgtacgctgaagctgagcaaggcactttcatatccaagtcaccttaggtgggcaggtggatgtccagggctgtgggtctgccgcctgggagggccagcctggccgctgttgcctgtgcccaggacctgccagtaccaaccttggtcctgccttgacttagcctgggttcatacctcagggatgcttggacctttaaccctttcccgtcgtacttgcccgttcagtcccttgctgactacaatcagaatggtttcaggactggctaagccctgtttttaagaacaagagttattaaccataggaatggtttgctaagaaagaaggtggccctcccctttctagaataaggtatagaatcaggcttaaagaagtaaaacaacaggttttgcgggttttttttagatacacatttactctttattttggtaagttgcataattgagttttttttaaagtgtataatgaatattttgaattttaaataaacaagattttaaagaaatccaacaaatcagagatctcacattcttctgcagagacaccatcaataatttcatagcattttatgcatgcttgggtgagtccttcattaaaaataagcttttaaaaataataggctgtagcaacttctacagccacacataaagtggtatttcctataatctgctctgggtagaggcagggaactgaaggcagtgtgtgtgaggggttaaccaggtggcttccttccagagataacctggtagaatatgaaggttttagagtgagacggatctagattcaaatcggctctgatactcactgcctgtgtgaccttgggccagctaccttcccttggattctgagtgctcctcttctggtaaagtcagactgttgatgataccagcttcccagttgttttgaagatgatctgagatacagcctgtgagtcagtctcctagaggcctagtgagctgctcccacagatcgtcactcccttcccctgacccttccccctttccttcaggtctcaggagtccagagtcattcatacatactctttctcccactgtaaagaggtatttaatctgaaatgaaatagttacataagcttctctcctgcccaatattcaaaaccagaatttataaaatagaaagctaagcaacaatgactagccttattccagaaggatccttctttttatgtataggtatttgctaaggcacttctaccgcagagcatttttctctccacattagctgctgctgttatccatttgacagagaagccgagaaaagaggctgagagctaacggcttaaatgttaggaacctttgttccctaaagatcaattcaagaaagagataaggtagattaaaaaaaaaaaaaagatttggggaaacatttcatttgtaaaaattcaagctgtttcaggaaataacttttacttaaagcaaactacacctgggattggggagcactgccctgccttatacctagaatgtggagcaggttgtgtgtgttgtggggggaggtggtaaagaaagagaaaggaggggagagggtgagatttcgaactgagagctcattggcatgaccattagaacaacttctgctggtcacagtcacagcgtattaaggtctgctgaggtgggattggtcatgaaatcgataagcactgcattttgtgtttgattctggtttattgtagactgttttctgcagacatcctttgatgtgcgtttggctgtgagcaaagtaatatagattttcccattgcattctgggtctcaaggctgactcccttgcagtccagcacctttggggtggggataaggagctatttgggatggtacctgggcctccagatgccaggcctggaccacgtgggaggtaggaactgatggtgttgatgtgtcctgctttggttaagattagctcaggactgaaaggaactaagctttcagatgggagctcctggtgcacagccatgggtagttggagatcagagaaatttgggaggggaagaaggtgctggcaccaggataggcaattgtgatttgatatttattctgcaagggtgggggttagggaggaatagggagggaggtagatttaagagtttagctatattttaagaagttaagggtgcaacatggcttggagggggaagatactggaatttttaaaatgaattgagaaatcattgctctgtctcagtgtgtgatggaaaggttagaggaatggagggtgaggatggagggaaaagggagagagatgaatgcaaagacagaagagagagggacaagaagttaaagatgattctaggttccaaagctggatgagtttgttcattcacgtattcattcattcattcattcattcattcatcattcattcacctaagagtaactgagcagcaccagtcagggtgctacacactggagggaaagacatgcttttctggaggtaactgtctaatgaagggtttatggatacaaaaatgggcaattacaacatctgtgggagcagttggggtccctggttgggagctacggggagtggttcaagacagcattttggagcaggtgatctctaagctgtcagctagtcaacaaaatcaaatccttagaccatagagggaaaacaaatgtggatgaggcatctggttggcaagcagacatgattgatgacctttgagagtgtagtttcaagagaattagaaccatggcaaaggcaatgttttaaagtattgtgcattaatagaaaaatcaaggtgcagtaaggccagcaggtcaggagacaattgcccttgaagagatagtttgttcctcacagttcccaagaggagggaccatgccacgccacggggagccacatgggaggtcctgggatcactcaggagcaagcaagaacctttactgtggtttctgtgggaagaaccaggtgaagcaaggcaagcagatttagggtgggcttgtttgaataattccagcagctctggggtataggtgccatcctagttgtgtggtacctggcccggggtgattagggcaggtggctggtggtccagagtgggagattcaataaaggaaatagttgggctataggctctggattggttggtttgttctcagaaaatgcccttgtgtacctatctctaggaactggctaaccctgggaggggcagtctctcccgggtcagcaagaccccaagatgtcgaagcatcaaaatacagaaaatgaaagacacggttaataccagcagttaagggaatcatcattgataacatttattggacactatatgtgaggcatgttttacatgttttaactcacttctcatggtgtcttttggacttaagtactactttactgaggaggaatcttaagctcagagaggttaagtaacttgaggtagtttacacagctagtcagtgtctgggcctggggtccagtgtagcaggcaagctcccaggctggtagtctcagctgtgtgctctgcggcttctgtagtgggtgctgagcaagccagcacacaaagggtgtggatccctcattcagcaatagcaactttaattaaaattaaaaatttcttgtgtttatatatggcattcttctttcaaaaacttccaatttgattctactacttccgccatgatggaggtaatggtgttttggcagtaggattaattgaggatcagaaagattttggggccgggcgcagtggctcatgcctgtaatcccagcactttgggaggccgaggcaggtggatcacttgaggtcaggagttctgaccaacatggtaaaaccccgtctctactaaaaatacaaatttagctggacgtggtggagcatgcctgtaatcccagctacttgggaggctgaggcaggagaatcacttgaacccaggaagcggaggttgcagtgagctgagatcgtgccattgtactccagcctccagcctgcgtgacaaagcgagactccatcaaaaaaaaaaaaaagattttggggcttttccaaagagacatcttgatgcagtctggaaggctgactcccgacttgggctcttctgaaagggactggaatttctttctctaggcaacaccagcaggccccctggctacacgttgctcttccttcatttgcatgtataccaagtgtcctcaggtttcagggaatcttttgcaagcccagttactgttctttctataaagaagtggtgaagggcagtctgtgctggggcctttggagcatggagtgaacccaaatgagattcacttggtaattatgttttccttaatgaagtttaaaaggggtggtaactaacagggctttatcctgacaccagccattcctcatccgtaaatggtgcttcgtagcagaagcatatgtgaagtttaaaatgttttgcatatactatctctattctccccatttttaatactgtaaatatattgtcagatcataatatatccctattaactctcaatcttgtttaatgctcatcattggttttatgtcaatgtctctctagttattttgttgtctgaaattcattctttagcagattcctaaaggagggctcttgggaacaatattctctcagttcttacatgttacgttaatataagtgtgtgttcttcacacttgaaggtgatttccacccaccactcttccaggcctcattcccagcccctgtgctttgcattgacccctccccaagagggtggacagctgatcggcctccattgagcatcacctgccctgagaggtattctagttatccccactgtgagggtgacaagcaacaccaggacccagaagccctggatctgccattaaccagctctatggcctcgggcaaatccctgaatcaaagaaggtcaagacccacaattaggaaactgaggtttagaggagaaagttgcttgcccaaggtcacacagatgtacccagatggtagattccaggccttggaaccagaccttcagcccaagtgttgatttgcccacatgaagtcccatgtaaagtttctcacataccatgtttgcctctaaaacagggccagttagtgtgcctggccttcctcacagtggataggacatctgaaagtgctttataagctgtgacgctccaaaccagtggttcttggtaagggtagcacctgtttttttttttaacactttaaaaattgaggtataatttacatatagtgaaattcactttttatgagtgtaccttctatgagtgttgacgaatgcatgcaagcatgtaaccatcaccataatcaagatctggaaccattgcagtgccctggaaactcccttgtgctcagccccctctccctaccccctgctcttggcaaccactgatctgttttctgtcctatggttttgactttcctaaaacgtcatataagtggaattagtcagtatgtagccttttcatctgttttctttcagttagcgtaatgcattttacaatcatccatgttgttgcctgtatcacaagtttgttcctttttttgtttgtttgtttttgagagacaaggtcttgctctattgcccaggctggagtgcagtggcatgatcgtagctcactgtaaccatgaactgctgggctcaagcgatcctccttactcagccttccaagtaactgggactacaggtgtaagtcacagcacccagcctgttcgtttttaatactggatagtattccactgttcaaatggactacaatgtatctatccattcaccagttaaaggacatttgagttgtatccagttcctggtgaccatgaataaggctgctatttcacaataatataaactgaagaggcattttgtcagtttgttaggtgaactttgtgtttttacaatgattggagaaggaatgttattggcattgaatgtgcccggcctggtactgggtaccctcaagattcaggacagtccaacacaatgaaggcatttcctgcttcctccaagacttttgcatgttctgctggaccttcatgtaagtgacaaacctgtttataaatgtctaagcctagaaactaactatattttatttatttgtaaattcagagtaatttttgtcaaggtttagtatgcattggattttccattaatgtaactactaagtaaactgacaagactatactttgttttgttctgaattttaccaaaattgtgcaccattttggaaaatcatatcaccctcttcactcttgccaacttggtttgtggtatttgtgttgccaacacaatactcctgtattagtctgaatttgtggttgctgtgtttatagtgattctatgtaagggtgcaaacatctgactctttcattatgtcttctagtttagtcttgctcaactattcgcataataaaatactattctattgcaaattttctttttattattctttatataattagggattatgtggatttttgaaaacaattaggtatgcagttacaaataaattttatttcagaatagaaaaggggccttacaaaatatctgttatagaaagggaattttgatttgaataagagttgagaaccattgctctttacaagagttagctggtctccatatccagcagcatagacagggcccatgtcctgagtgaaaggtttaggttggtggctggtaattttaggaaaatgttcatgttccagaacttgctatggcccagggcttagttctgttaccgaaacaccagggctttagtctaggtcctgttgttccccacatagaaagccagtgactgagatgactagtgttgccaaggaagaaggctttaattgggtgctgtagccaaggagatggtagatcagtctcaaatccatctccctgaccaactaaaactaggggtttatacagcagggaagaaatgtaacagtgtgtaagaaaacaggaactagggaggggcaaggaagcagtcatgaggaatgaggggtctggcatctcattgcttggatgtggtcatctggtgagtttcaattctttgattcttttcttgagagccctgggggtcctttcttgaggaataactcagataaaacaaactaagttgcaagctttaggaccagaagggtcattttctatgtttataaaaaaaaaaaatctatggaactattgggtcactttctgttcccttggccatatccagaggcatttggaaatacatttggcaggcaaatatttatgggccacttattacataccaggtgttatccttttccacaaagagaattctagtgatggtggtggtggggggtatacagacagacaatatttttatatacaaataaatgaataagataatttcaggcactgatgagtgctaaggcaaaataggtagcacttagggtattcaggaaggcttctctgagttatacctaatggtgagaaagaggcagtgttacaaaaacctagcagaaagacattccaaccacagggaactgcaaggacaagtgccctgagatgggaagcatttgaacatgttttggggacaaaaggatgaccagaggtcaggaacatagagattatagagagagtggtggaaatcagagaggacagcatggtcacaattatgtagggtcttgtaagccatagtggaggttggaatgttattgtttgcagtagaaagcctttgggatctgttaaacatggggatgatatatctgagttatgctttagagagaccactgtggctgccctgcagggagaatagaggcagagagaccagtcaggaagctcatgcagaagtccagaagtgagatggtggaggcctaggccagggtaaaagcagtgttgatggtaaaaagcaattgaattagagatgtattttggagatagaatactccacatccattaatcacgtccattggccagagcctatggacatgattaattttggaatgtggggaaaagagactgactgctaagtttttggcctgagcaattgggaaggaggtggtgccatttattgagatgggaaaattaatagagatggtatattttaagggggaaattggcttattttggctaagttaaatttgagacatctattagacatagatcatgtcaactaatagttgggcatagaagttgagagatgcaggctggggataaacatttgaaagtcatcaacaggagagcctctggtaacatagcagcagtggtggcagcatggtttgtggatcttcccaaatccccacataagacagatgaaacaacaaaataacaaaaccaaaaatccatagacaacatttacaataaaactaggtgacgggagtatttccatgaacttccaaatacaatagggtggggagaaacaattaacaaataaaagacttctctgttatttgtgtccaaaaatgaaaagcagaaagaagcaaggggaagacagacctgagaacaggagaaccacaaactagcaacagatttgcactggaaaatgtgatgggccaatttgaggataggaactgcagttgggaggggtttggcccacttcagtagtaggtatgtgcaacaagtccaccagatggaacaaaggggcgagagcagcctcgttcctgcatattctccagactgacctctcagggcttccttccagagttcccactgaagagaaaccactgggaatggaatagaaattgaacagggtgaggaaaataaagactaaacaaagagaaagtccagataaaagttggggaggggaacagaaccaggaaatctcagaaaggaagccaccagaaatttttttaaacgctatataaaacaacagaaatgggagctctgtgaaattagaaaggatatatgaaagaaacctcattctaaaggttcaggaaaacttattttacatagaaatgaaatgattggatccaactttaataaaagttactgtaagaaagagagaatgagatgagtaacatcctgctgagcatgaaagcacaccagaaactcatgctcagaaaagcagaaaaaaataaaaacctatggcacactgtttcacgatgagctcaaaagcattttaaaatgataaaagacatgaaagataacataaatcagaagtagaaaaacttagaaatgggatgcagattcaagaaagaattagaaatagaaggaaaaacattattttataaatgaaaataaaactataaggagcacaagaaccaataaacactataaataatgcttatgagaaacaaaaagcacaaagggaggaaaattttagaatcaaaaagaaattaagaatgtgataaatatggtttgagagaaaaatgacaaatattgaagataggcaatgaagatccaatatgtgaacaataggcatccctgtgaagcaaaaaccaaagtaacatcctaaaaattataattcaaaaagcctcatgaaattaaacatatataaatttaaacttgtatattgaaagagcacactgtgcacctcagaatattaactcagaagaaccaagacatattttagtaatataactgggttttaaagaaaaagaaaaaaaatactttggacatctaagctaaaagtgacatataggagaaagaaaatgacattgtcattctgacttttctacagtcatatgttatgagagaagaaaatggaataacatattaaaggtattcaaaaaagaaaatgtgaacatgagccaaggattttatattcagtaaaatcgaccttcaagtgtgaagaacacacacttatattaacgtaacatgtaagaactgagagaatattgttcccaagagccctccttcgggaatctgctaacgaatgaatttcagacaacaaaataactagagagagattgacataaaaccaatgatgagcattaaacaagattgagagttaatagggatatattatgatctgacaatatagatataatattaaaaatggggagaatagagatggtatatgcaaaacattttaagcttttaaaaatatcttttcacaattttatttttaatttttgtgggtacatagtaggtgtatatatttatgaggtacatgagatactttgatacaggcatacaatgtataataattacatcatggtaaatggggtattcatcccctcaagcatttatcctttgtgctacaagcaatccaattaaactcttttagttatttttaaatgtacaattaaattattattgactatagtcaccctgttgtgctagcaaatactaggtcttattcattcttttaaactattctattgcaccaattaactatccccactttctccccacttccccactacccttcctagcctctggtaaccatccttctactctctttctccatgagttcaattgttttgatttttagatcccacaaacaagtgagaacatgcgaagtttgtctttctgtgcctggtttattacacttaatataatggtctccagttccatgtattttgttgcaaataatattatctcattttttatggctgaatagtactccattgtgtatatgtaccacattttctttatccattcgtctgttgacggacacttaagttgcttccaaatcttggctattgtgaatagagttgcaataaacatgggagtgcagatatctctttgatacactgatttcctttcttttgggtacatacctagcagtggattcctggattgtatggtaactctatttttagtttttgaggaatttccatactgttctccttagtggttatactaatctacattcccaccagcagtgtgtgagggttcccttttctccacatgcttgccagcgtttgttattgcctgacttttggacaaaagtcgtttcaactggggtgagatgatatcttgctgtagttctaatttgcatttctctgatcatcagtgatgttgagcaccttttcatgtgcctgtttgccatttgtacgtcttcttttgagaaatgtgtattcagatcttttgcccatttcttaattggatcattggactttttcctatagagttgtttgaactccttatatattccggtaattaatctcttgtcagatgagtagtttgcagatattttcttctattctgtgggttatctcttcagtttgctgactgtttcctttgctgtgcagaagttttttaatttgatgtgatccttatttgtcaatttttttctgtgtttgcctgtgcttgtagggtattactcaagaaatctttgcccagaccagtgtcctggagagtttctccagtgttttcttgtagtagtttcatagattgaagtcttagctatgagtctttaatccattttgattttatttttatatatggtaagagatatgggtctactttcattcttttgcatatggatatctagctttcccagcaacatttattgaagagactgtcttttccccagtgtacattcttggcacctttgttgaaaatgagttcactaggtggggcacggtgtctcatgcctgtaatcctagcacttctggaggctgaggtgggtgtaccacttgagctcaggagttcaggaccggtctgggcaatacggcaaaaccctgtctctatgaaatattatacaaaaattagccaggtgtggtggtgtctacctgtagtcgcagctactcgggaggctgagatgggaggatcactttagcccaggaggcagaggttacagtgaggtgcaattgcgccactgcactccagcctgggtgacaaagtgagaccctgtctcaaagaaagaaaggaaaaaagagttcactgtagatgtatggatttttgtctgggttgtcaattctgtttcattgatctatgtatctgtttttatgccaatacaatgactttttggtactgtagctctttgaagtccagtaatatgatccctccagttttgttgtttttgctcaggataactttggctattctgggtcttttgtggttccatatacattttagttttttttttctatttccgtgaagaatgtaattgatattttcatagagattgcactgcatctgtagatgctgtgggtagtatggacattttaaaatgattgattcttccaatcaatgaacatgaaacatcattcccttttttggtgtcctctttaatttctttcatcagtgttttttagttttcattgtagaggtctttcacctctttagttaaattaattcataggtatttaactttatttgtggctattttgaatgaaattactttttgatttctttttcaggttgttcagtgctggcatatagaaatactactgattttatatgtggattttgtatcctgcaacttttctgaacttgtttatcagttctaatagttttttggtggagtcttcaggtttttccaaatgcaagatcatatcatctgcaaacaaggataatttgattcctttctttttcagttttgatgctgtttctttctttctcttgtctgattgctctagctaggacttccagtactgtgttgaataaaagtggggatggtgggcatccttgttgtgttctggatcttaaaggaaaggctttcagtttttctcccttcagcatgatactagctgtgggtctgtcatgtatggcttttactgtgttgaggtatgtctcttctatacctgtttttttttagttttttttttttaatcatgaaaggatgttgaattttatcaaatgcttttcagcaacaattgaaatgatcatatggtttttgtctgtcattcttttgatataatgtcacgttgcttgattgtcatatgttgaactcccttgcatccctgggataaatcctacttgatcatgatgaatgatctttttaatatattgttaaatttggtttgctagttttgttgaggattttttgcatcagtagttattagtgatactggcctgtagttttctatttttgatatgtctttgtctggttttgttctcagggtaatactggccaaatagaatgagtttggaagtattcccttttcctgttttttggaatagtttgagtagaattagtattagttctttaaatgtttggtagaattcagcagtaaagctatcaggtcccaggattttctttactgggagactttattatggtttcgatctcattacttgttattggtctattcaggttttggatttcctcctggttcaatcttggaggccgtatctaggaatttgtctatttcttctagattttccaatttattggtatatagttgcttatagtagccactaatgatcctttgaatttctgctgtgtcagttgtaatgtctcctttttcacctctgatttgtttgtttggatcttctttctttttttcctagtccggctaaaggtttgtcatttttaaaaatgttttcaaaaaaccaactctctgtttcattgatttttttgtattctttgtttcagttccatttatatgtgctctgatctttatttctattaattttgggttcagtttgctcttggttttctagttcttgtttttgttttgttttgttttgttttttgttttttttctgacagagtctcactctgttgcccaaactgcagtgcagtggtgcattcttggttcactgcaacctgtgcctcctgggttcaagcgattctcctgcctcagcctcccaagtagctgggactacaggtgtgcaccacaacacccggctaatttttgtatattttttagtagagacggggtttcaccatattggctagcctggtctttaactcctgaccttgtgatctgcccgccttggcctcccaaagctgggattacaggtgtgagccaccatgcccagccaacttttctagttctttaggatgcatcattaggttatttatttgaaattgtttttattttttaatgaggcacctacaggtataagcttccctcttagtactgttttcactgtattgatagcttttagtatgttgtgtttccattatcgtttgtttaaataaattttttcatcattcgggagcatattgtttattttctgtgtgtttatgtagttccccaaattcctcttgttattgatttgtagttttattccattgtggtcagagaatatgtttcatattatttcaatttcattgaatgttttaaggcttgttttgtgacgtagcatatggtctgtccttgagaatgatccacgtgctgagaagaagaatgtgtattctgcagccactggatgaaatgttctgtaaatatctattaggtctatttattctacagtgcatattaagtccagtgtttctttgttgattttctttttggaagatctgtccgatgctgaaagtggggtgttgaaatctccagctattattatattggggtctatctctctctttagctctaataatatttgctttatatagctgggtgctcaagtgttgggtgcatatgtatttacaattgttatatccttttgttgaattgacctctttatcattatataatgacattctatgtttcttcttacagattttgtcttgaaatttattttgtctaatatatgtatagctacttctgctcttttttggtttccattggcatgaaatatcagtctatgtgtatctttataggtgaagtgtgtttcttgtaggcaacagattatgtggtcttgttattttgtgcattcaagcactgtgtgtctttttattggagaatttagtccatttatattcaatgttattattgataagtaaggaattactcctgccattttgttattttttttctggttgttttgtgatcttcttgtccttcttgccttccttcctgtcttccttttagtgaaggtgcttttctctggtggtgtgatttaatttcttgctttttattttttgtgtatctgttgtatttttttggggggggagcttaccataaggtttgcaaatactattttataactcattattttaaattgatgacaacactgaatgcacaaacaaactaacaagcaagaagaaaactaataaaaactctacatgttaactttgaccccctgatttttaattttttgtttctctttatgtcatattgtactatgccttaaaagttgttgtagttattaatttttattggttcattgtttagtctttctcccttttttttttcttttttttgagatggagtcttgctctgtcacccaggctagagtatggtggcacgatcttggctcactgcaacctccgcctcccgggttcaaatgattctcctgcctcagcctcctgagtagctgggattacaggcacccgccaccgcacctggctaatttttctatttttagtagagacggggtttcatcatgttggccagactggtcttgaactcctaacctcatgatccacctgcctcagcttcccaaagtgctgggattacaggcgtgagccactgcgcctggcccattgtttagtctttctacttaagagtagtttacatcccacaattccaggattataatattctgtgtttttctgtgtgcttactattgccagtcagttttgcaccttcagatgatttcttattgctcattaacgttcttttctttcagaatgaagaactacctttagcattttttgtaggagaggtctgatgattgatgaaatctctcagcttttgtttgtctgggaaagtttttatttctcctttatgcttgaaggatattttcactgaatatattattctagggtaaaagtttttttccttcagtactttaaatatgtcatgccattctcccctaacctgtaaggtttccactgaaaagtctgctgccagacatattggagctcagttgtatgttatttgtttctgttctcttgctgcttttaggatcctttctttatttctgacttttgggagtttgattactaaatgtcttgaggtagtctggttcaggttaaatttgctttgtgttctataaccttcttgtacttggatattgatatctttctctaggtttgggaagttctctgatattatccctttgaataaactttctacccctgtctatttctctacctcatctttaaggccaataactcaggtttgcccttttgaagctactttctagatcttgtaggcatgtttcattcttttttctcctctgtctgtgtattttcaaatagcctgtcttcaggctcactaattcctccttctggttgatcaattctgctgttaagaggctctgatgcattcctcagtatatcaattgcatttttcaaatgcaaaaagaacctaggcctggactcagggaccccaagaagtatataattcctgcttgattctttttaattatttcaatccctttgttaaatttatctgatagaattctgaaatccttttctctattatcttgaatttctttgagtttcctcaacacagctattttgaattgtcgttttgaaaggtcacatatccgtttctccaggattggtccctcgtgccttatttagttcctttgctgaggtcatgttttcctggctggtcttgatgcttgtagatgtttgtcaatgttgggcattgaggagttaggtgtttattgtagtcttcacaatttggacttcgcaatctgtgttattcttcttgggaagactttccgggtattcaaagggacttgggccccaagcctagtaatgctgtggctcttgcagactcacagagttaccaccttagtggtcttgggtaagatccagaggaattatctggattactaggcagagactcttgttctcttcccttagtttctctcaaacaaatggcatatttctctctctgtgcttagccacctggagctgggggtggggtgatggaagcacccctatggccaccaccactcaaattgccctgggtcatgcctgaagccaacacagcactgggtctcacccaaggcccactgtaaccagtacctggttaccacctatgtttgatcaaggccctagggctctacaatcagcaggtagcaaagccagccaggtttgcatcctttctttcaaggcgacaagttcccccaggcccaaagtgggtctatagatactgtctgggagccagggattggagtaaaaaaaaaaagccttagaaatctacctggtgttctattcttctgtggctaagctggcacaaagtccttcccactcttccctctcctttccacaggcagaggagcctttcctcatggcctccaccaccactggcccatggggagttctgccagaccactgctaatgttcccttaaggcccaaggacatctcagtcagcttgtggtgaatactgccaggtctgggacacaatcctagggccagttagctcccttctgtcccagggcaggtccagaaattctgtccgagagcctaggcctggactcagggatcccaagagcctgtttggtgctctatcctcctgtggccgagctagtaactgaagccagtacatcttagagtctcacccaaggcccatggtctgtattccctgggtatcactgttggttattcagggcccaagggctctttagtcagcaggtgatgagtcctgccaggactgggtccttcccttcaaggtagcaggttcccttctgggccacggtgtgtctagaaatatctgggagccagggccgggaatggggacctcatgactctgcccagagtcctatcctactgtggctgagctggtaactaagatgcaagacaaagttgtctttactcttctctcttctgtcctcaagcagaaggaaggagtcacttttgttgctgccagctgtgctgagtggggttgggggaccaagcactcccttggtcacttcgactggtgtctacctaggtcacgcactgctccagtccactggctctaagcccagcacagcatcagaactagcctaagacattttacactgttttggtaatcataatttactggtagtggtattagtattgttattgttattctgaggctgttggatgtataatgtaggataaagcaaatgaataattagaataattatggttcattctaattctaattctattatttctgtgttcttgaggaccagagttctcagttcaaaagaatggaaatacatagttgtatagaagaggtaaggttgtagatctggacttgaatttgaatttttaattacatatattctctctctctctctctctctccccccaccctgcccacctctgttcactgaaaaaggcctagaaagtatgaccaagaaatacaatgagcctcttatccccagatgtggttgtgatataccatttcccattgaaagaaggcagggcatcttggagaaatggctgatcccaggtctgggcagaagatgtacaatataagcctggaataggtcatgtaaaaggacttagaagccaacgtaagaggattcccactagccgaagatgacaacttgagctttaataaggatagtcgttgcaatggattggaaccgatgtttagacatggtctagtatatttatactcatgagttcataatgccattttaaaaattatctaattggttatctcctgaggatggccgggaaccactttatcttgaaaactgagtaaatacaggaaatgagcacttttcttgtcactactatttgaatgtattatttgaataaccaaataataaatgaggggcagcatctctgcataaaattattctagctgataaatgaaatctaaatgatttatggatccaaagtctagacattagacattgagcaccaatagctgctaatactaaaaacagggcaaaaagcaggcattgtgtgttcctaatgaagtgcatagctttggctaaaagaattgaacttgagcctgatcaagcctcagaatccagctgtcaatttcaagaatacagagacagttcaacgtgttgaactgcacagaagtatgcaggccacagaatccagactgggagaaattccattgggcaaacgaacaaataaattgtaaggaaaggaaagagatgaaggaggaatccgtaaattaaaagagagttagaagacataaagtttcaaaaactaggcaagactagtgtctaggaatgcacttgggtgataaatcataaaagaaaaaaaaccacaaggaagtgattactctaaaagtcagggaagttgttacttttggagaggaggtagaggctacggttgggatgaggacatggggggctttctgggtggttggcaaatttctatatcttaacctgcatagttattatgaggtgttcaccttataatgattcagtaaaccatttatattgtgtgtgtggttttctgtatctatgttttattttacaataaacaggtaaaaaaatcaaaaccaggaaaagtgatgaaaacataagcggaatttaaagccttgggaatggataatttcatttgggagagaggatagatagggcagacagcccaggactgagccttgggggcactccaatgtttgaacgtctggtaagaagaggagattgagagggagccgccatggaggcaagaaaacaaagtggtagctataaaggaacagatgaatgagatatcagggaagcttagagaagaaagtatttcaagatggagtaaatgctttaactgctcaatgctgcttgcagactagagtgagcatagattacccatgggctttggtgcaagggaagtgattggtaacttcagtaagcaccgtctcagagtggtggcaatagcctagcagagtgggttcaggtgagaatgggagtgagatggaggcaatagtttcaagggaaccttgagtgatgcaaaggagagggcaagcgataggtcaggaaagcccttgactgtcttagtgccaggcacaatacaagtcagactcagccccaatggcagggcactctgcttggaagatgagctacatggtgtgttctgctgaagtccatcaccgttcatcccccaccccctacccaccctgtctcatgcgctgctctgcccagtgcatgatgctgaagatagacctgcagcagggcaggcagcagccagctgctgttctacatgcagggcaagcagggcctgaagggcaggaggcaccatgcttgcgggcaacagcagccaactgctgagacaggatgccaagcagatcaaagccgtcagctgggatttctgatccccatcaccacctgccttggcaaagttgagagaatgtattctccctgtgtcttgttcgtgccttccctctgaagctcagtcacagccatttctcatcctggtgagatgggggaggaggggctggcacctgaagatgacgcaggccagagcttttggagacgcagccggtagggagcggactctggcttgtcggcagagaggagcagagtagccttttgttcattccaagatcagagccaaaaagttgaagcagagaagtttcacagcagggctggatactctcttcagagcagcctggcaatataaaaagagcatttgtagcccttggtccacaccagcctggtgtcctcccttcttagttgagtttccaaggctcaatcccccctcctgtagccacctgccctgcccatgggcagaggcattctagtaggttggcatggtgttaaccagccaggcttgattttccttatctatatggaaataatagtagtgcctgcttgtagaattactatcagaaatgggttcctatgcttaaaatgcttagagcagtgcttaccacacaaatggggccaatcttagctgatctggcccccttgagtttcccatgggctctgcctgctttcctgccctctgtgtcagaaactcaagagacattcccacaggtctgagcctgggcctctttcaggccttgcttcatggaccagagctcccttggaggtgagagtctgtacattaggactgctcactgcccaatgaggttagagttgcagggaccatggagatgattttctaggtgagaaaactggggcccacagggaaggaatccttttctactgcttctagaactttctctgtcattctgtgtttctctgagacaacatgtttagacatctcttatttcaacatatacctatcagagcaaaattctgcattgcaatatggggcactttggagtcccaagatctaggggtgagtgtgtgtctcggactttctgtcctcaggtgacgatgctcagtgtcagtatgcatatgcagtttctagcatttgtgataatttacgctgatctggtacaatcacacatctgtctaatatccagagggcaggcctaaaccagaggtgacgtttgtggctccaaacagagtccactaacaagatcacacacagaccaaacccattacccttgccctaggactgcactccagccagctgacctcacatgccccaacctcgtccaccagggcagcccatctggtggccaaaggctgtgtttgggaaacacagatggctggtttgcattacacggaacagcttgggatgtggactacatggacaattggctgaacttttgcagatttaatcagatgtttggcatcacataggtgtagattgactctccttcccttctgagcctactctccacttcaagaattttaataaaatgcctgagcctggctgtactctacaatcgacaactgttatacctgagcatagcatggggttgtagttaggctgctgggaaagtcatatgccggccatgcacctgctgttgatgtgaaaaccagcagaagctagacaatcacagccagccttttgcggtggcagtagctcccagcccctccttccctcacccccgcatgagtggcagagccttcagctagagaaaggatagggactgaagcatccccacaggaacctgctgaccccacattacccagagctgtcccgtggccctgtcccagctgggactctgagcatcatgcctcatcatgcactccacccatatagggccccagctggcagaggggaggtgaactgccaggaagtgatccagcattgcctggtaacctgggaggaactatctctggcatctgcctgggatcctggtctccctggtttggtccagaggagtttaccccagtctctgtgctcccatggagctgagtgactagtgaggaatgggagcattgtccctttgcttctcttgcccatcagtcaatccacctcccgtgagtgcctcagttagtgtacctgtaaagtacaatggcctctcccacccttctcctggccatgtatctgcataatgctttattatgggccctctcctgggtcattctcaccttaccatagagacgaggcatgtttatttggttttatttgacgcaagatctgagactgcactgagtgtccaaccctacctcacatttctggggtcttccggctggaccagggacctaagggaggaggggcctcagtaaagctgtggatagtgtgtgtgaggggcaagtttctggcacctgctccagaaccccactgctgtgctgtctctctccttcgtgtaattgctagcactgagaatttaccaggtgtcaggggtctttctgagcccctgcatgcattaactcatttaccactcacaatatcctccactttacagttgaggaattagagacatagagaaagaagttaagaaactggcctcagtttacacagctgagaagtggcagaacaggccgtgtgctttctttttttttttttttttttttttgagacggagtctcactgtcacccaggctggagtgcagcggtgcgaccttgacttactgcaacctccacctcccaggttcaagcgattctcctgcctcagcctcccaagtagctgggactacaggcacgcaccaccacgcccagctaatttttgtattttttagtagagatggggtttcaacattttagccaggatggtctagatctcttgacctcttgatccgcccgcctcagcctcccaaagtgctgggattacaggcatgagccaccatgcctggccctggcaatgtgctcttaaccacactgtgcaatgctgcctttctgcaaaaatagcaaatgtgtagatttccttcctcaggcggccttctattcatgtgagtgccccacagggtatcttaacttttcaggttaaatataaaatgccttctgttttcattcatggatatcagtatacatgcacgcatacatgcacaggcaagcacagacacactcacatcaaccaattgtcattaccctgctcttcattcattcattccgaccagcaaagcccagtgggcccctgtggggtaagatgcagtctctgccctgggggaattctctggctaagaggagacatagatctgtgaatatgcaatggctctagggtagctgcagcaatatggggacacagaggaacaaatatgatctgggaatttggagactgggctcacatctcaggaattaaggaaaggtttggtcaaatttacaaaagaaaaacaaccccatagtccgggcatggtggctcatgcctgtaatcccagcattttgagaggctgaggttggtggatcacctgaggccaggagttcaagaccagcctggccaacatggggaaaccccgtctctactaaaaatacaaaagttagccgggcatgttggtgtgtgcctttagtcccagtcacttgggaggctgaggcatgagaatcgcttgaacctgggaggtggaggttgcagtgagccgagtttgcgccagtgtactccagtctgggccacagagcaagactccgtttcaaaaaaaaaaaaaaaaaagtgggcaaaggacatggacacttcaaaagaagatatacatgcagccaacaagcatatgaaaaaaaaagctcaatatcagtgatctttagagaaatgtaaatcaaaaccacgagataccatctcacatgtttcagaatggctattattattattattattatttttttttttttgagatggagtcttgctctttcgcccaggccggactgcagtggtgctaagaatggctattattaaaaagtcaaaaaatagcagatgctgtcgaggttgcagagaaaagggaacacttatataccgttagtgggagtgtaaattagttcaaccattgtggaaagcagtatggcgtttccacaaagagctaaaagcagaattaccattttactcaacaatcccattactgggtatatacccagagaaatagaaatcattctaccataaagacacatgcatgtgaatgttcattgcagcactattcactacagcaaagacatgggatcaacctaaatgcccatcaatgacagattagatgaagaaaatgtggtacatatacaccatggaatactgtgcagccataaaaagaatgagattggctgggcatggtggctcacacctataatcccagcactttgggaggccaaggcaggtggatcatgaggtcaggagttcgagaccagcctggccaacatggtgaaaccccgtctgtactgaaaatacaaaaattgtcaggtgtggtggcgggtgcctgtaatcccagctactcgggaggctgaggtaggagaattgcttgaacccaggaggcggaggctgcagtgagcagagatgacgccactgcactccagcctgggtgacagagcaagactctgtctcagagaaaaaaaaaaaaaaaagaatgagattatgtcttttgcaggaacatggatggaactggaggccattatgctcagcaaacaaatgcaggaacagaaaatcaaatactatatgttcttatttttaagtgggagctaaatgatgagaagttatgaacacaaagaaggaaatatcagacacaggggtctacttgagggtggaaggtaggagaagggagaggagtggaaaagataactcttgggtactgggcttaatacctgggtgatgaagtaatctgcacaacaaatccctgttatgtgagtttacttatgtaacgagccttcatgtgtacctccaaacctagaataaaagttttttttaaaaaagaaaagtttttgtataatagaatcttggaattagccataaagaagacctgggttcaaatcccagctctgcccattactgcctggggaattgttgcaaagatggtgtgttgaaggatttggcacaaagttcagcacatacaaagtctcatagatgctttttgaaaatttttttcactaacttgctttgttaccttaaacaagtcagctaacgctgttgggcctcaattgtcttatatataaaatgggagcaatagtatctgccttgagtatctttaaagctgctggtaaagagaaaactatttactgtcggtggaagggctttaatatgtgaacttcaatcttcattgtaacgagtagcacagcgaggctggtgtgggagtcatgcagagggaagccagagggccgtgacagaatcagtcctctaaggtgtgcagctgaaagatcctagagatggagatggagctaagtcctgtataattctcccggcaccccggtctctctcatgaagtgagtgcaaagcgctttgcagtgatagagtcttttagagatgcttcctaataacaacctacaagctgcccagggggaatggggctggcaggaacattaatgaggctgttgggtgtctgttaaagctcggctccatcagactctgccgcaaacagctgctgggacttgggaatatctggaaacagtgtggggctcaggcttcttttttccccccgggcctggacgctgggcacagcaagacccacaaccccactgtccctggcccttgtcaatcatgttagcctttttgctgttcatatgttatactttggggttttaattcgtactaaataggcaggaagatagaactgaaaagcttgttctctggctgcgtacaagaaggacaacaggagtaatgttgactgccattcaccctatgccaggccctgggcaaagggggcagtcgtggtgtcccagcaactgactgggcagtcagagaatggagtgttccctttcttggaagaggagtaaagaggaagcaggaggagacacgggtagggtagaaagtgtggggcagtgcagggaagaagaggtggcatttgtataaaaagactcacgaggagatttatgtggaagttagtgctggaaaaagcaacagttctatgtagaatattaatggaatccattttcttgccatctcctgcaggaacactttggaagtgcaaggggaaaaaatcgctttgcagtaataactgttatttatataagagaacagcaatgaatatatcaaaatgtgaggtttcaaggtaataactggaccatcagaatcatcattatccatttaaaaggcaatttctgggcttggaaattgatagaaaaaaatggcccaattctaccacggtggtaaataaatttgtgtttcttttttatgatttgattttgttctgaacctgatgggacttgatgaccgaggggaattgagtagggatgtaaatgggaatgaccgtcccagctcatccttgctgatgtccaaacatgacagctggggagaggcctccagttttcatcctggtcacagttggagggaaaacagtggagacagaggaggtgactccggccagagtccactggacatcttctagaacacttactcctggatcctgtgattctgcctctctctcgcctgccaagttaaccagcatgggtgaacattcctctggcttttttctatttatactaaatctataaatttttttttctctccaaagaatggggaacattccatacgtactgcatgacaatgagcccattacactgtatcgtgaacagctttccatatcagttcatatgcatccatctacttctttttaaaagctgtgtgcttgtcctctaatgtactatcattgaactaacctttcccctttaggtggacatatgggttgtttccatccctgtgcctgggtctttgtacatttgcaggagcatttctggagagtaattcctagaagtggaagatttgggtgaaagggtatgaacatcttaaagcagaatcagttgggcattgttgaccttgagaaatgagattcaacaacgtttgtcctctaggtcgaatggattctcattatgtcagactactgcacaaaaccctgaaagatcttttgggaattggtgattttgcttatttaggggccaggatgaagactgagaaagagatagagcttgttttggactgtagaacatttagcctcactcccaccatcagtgggacttgagaggtgttcaggagggtagtgatgagcccctttgcaacctcagctagtgataatagcagctaccatagagcactgacgatgcattaggcacctggggcttgctgtccaacccagcattgtgattccagctctgctcttaatgagtttgggacttggggatgtttttttaacctcttcctgggtgaaatgggaccatcacaaatacttcacagagtcactgtgaaaagtaaatgtgatagctcttgcaatattactttgtaaagaataaggtgcttcataaatgtcagtgtctttattaatcatgtatttgaggttgatttaaagctgaccaaagtattccttccctttcctcccctctccaccacagtgctcagagccctgggacctaaagaaaagagatgtgttcgtttcctctttgctctttgaccttgaggaagttattaaacctctctaagatggagcttccctttctgaaaactcaagggaggtacaactgtgtaagaagctcagccctgtcaggatcagcagctctgctgattttttagatacggtgtgggacaggtaggtgcctaggtaggtaggtgggacaggtagataggtcatgagggcaagatgagaagagcaaactgctccttcctccagcccccttttctgtcctagccaggaggggagggctctgtgccctcagagcccagggtcaacgaatgtggagtggtaacataaaaaatgccttaggagaggaactgtcctaggtagcaagcggggaggagcttctgcttacccaaaagggggaattaaggctccatttctattcagccacaatccattcccagaaatcaagaaatattcatgagctgcaagcattggatggcaatgtctctctgtcatcatcaggaatgacagattcctcagagaagaggcagagctcaggtttcccatcttctctaagcacgtcactcagtaggatttcaaatacagacaactcttgaatgaatgcagtcactacccacggaagcaaaggttggaggatgggaaaattcagcagaatgttgaagactatggagttggaatcctgactccaccactggtaagctgtgcgacattgtgcaaaccacatccccttctgagccagggacgatgggcttgctctaagaatgaaatgagatcatccctggctttttttgagtaagcactcagtaattggtagctctgtgaggtatggcatccctgaaataacaggtgcgtgctgtcgccaaactctcacaattcaggcccacaaactcaagcctttctcagtatcagcagacctactgccttgatgttctaacaacccctaatgagtatagtatgatcatcagttaaataaacaaacaattagtgagtgagcagaaggctcttcctcagcacatcctattaatccgctggtctttagttcacatttgttggaagctgattaactgcacgtcccaacaggcactgggcaacttcagttctgagccagacctgcgcatccccagtctgtcttgacttgccccagtctcctcccccgctagggtgtgtgacaaaccgagtcagtgttagcagtgatgaaaatgtctggaaggaagccagaagtgatggaaaaagtccaaaaccccataaacggattaccctagatgtaaagtcaggagtgttaaggtagtttgaggctgatgaaaagcttagacagatagctaggactttagaaattactttggaggtcttcagaacaatacgaggtgaaggagggagaaaaggctgccagggttccttgttctatgcgccgttcccatttgtggtattttcgcttagtgatttattttgagcatagctcagtagtactgttaatatttttggtattgtggttaatattgtgaacattattgtcaaataattttaatcagaattttatcaaagtgtctagaagtcagcttagggcctggcacaaaatctttgcgtgtgcgtggctacgcacacatgcaaacctatgcacacacacaccagttttcaagcctcaccctctccaagtgtgctcttcaaacaagattcagggtgagggccgtgatgagtaaacttgactatttataacccaagcccatgatccagcaactaagtggtttaattacgcttatcactgccaggcgcctctgtggattaatgtagctaattcaatatcctctctaagaagcgccattggggactgtgattctgctctgaggagcagccttcagcctctctgttcaccaccaagaccttggctggggagttggtgtttgtctcccgaggtggtctgtgagaagctggccgacaggttaaaccctcctctctccctgcgtccctcctcctctagcacttggctgttgtgtccattggaaaccttcccagactctcccttccacctcccatctccttccaccccctgccaagcacttttaatttgcttggaataattgattctgtcttcttcttgcacctcatttttcctcacttttatttatcaccttgaaacctctccttgatgtacgcaggccccatgtctgtggggagatgagagtagggtgctgctgtgtagcgggtgggtaaggggacagcctctgctaccagacccacagtttccactctcccccaggcactggtgacctcatggctgtgtctccaagtctaggaagcacctggcacagaggagagtaatgaacagctatagaagagagtgaggaaggaatgaaacgtgcctgtgttttgctgactctggcatttgcacttggtttttccccacaatggcaaatggcctccccctatacctcacacctagtgaccattcacagtggcactcagcacccaatccctctgtaaagccctccctggtcaccatttgctctttgcatgaaaaagataaggtttctattgaaaccacaggacagcgaattgcccagggcccttcgggagttgaaggagaggctaggcaagctgcagccttccatctgcccaagaccgttagggaaatctgcctgttgttcctgggtagcttttctaaggtctcctcaaaaatagtggtgctacagccacaaagccaagtcaaatgaattagaagtgggaacccattaactttttgatccaggctttatggccatttttaagttatttaacctactatctcctcctcctgctgatttgtgaggattagacatttgctaaggtgggtacatttaagcaggaacaagaaagctctggtgggtttgggattttgtaggcagagttggatccctgcttggccctatagtactttttttttgccccaggggagttctgccaacattccccccaccccatcccactcccaacatcctcccagtcttctgctgatctaactgggaaaagacacagatcactccaggactccaaagtagatgatctctggacactggtagctgtggtgccaggctagaaagaagccccctcctctcttctgtggctagggcaccatgggcaggtgtcgggagagggggccagcaacagggccccgagagcctctatctgcccagctcacatatggtgtcgaggagccacagggaagcaaacggtcctacttctgtccttgtgccacccacttttgtggaagccattgggctgctgggctcagagcaatccgtagagctttccaggcaggaagagaaggtgcaagacagagcagaggaactccccagaatgaatcacaccaaaaggcctgggttcgtccagctgagaattgagggtgtagccaagcacaatgagcacagcctctgagaggacagacagcaggaagatggtaaataatgccagcgctgctttgtggtagggagctcttttgaaggccagttgtagaggaggggccccacagcacaaccttcagcatctcagccttggtgggactccacagaaggactgatgggctcagcggtgggcggggggaagtttcagaatcattttaaaatttacttttatgctattaattttttgctgacagattagaaagataaatcaatctggcagtgggtcctgagtttagggttgttttctatgtatgcaagaaccatttgttaatgtgctttgttagctgtgtgagggagagaaggcaggccagcagccttgggtagaaaatccaattttagcactggaaggagcctcagaggtcctggtttagcctcctcattttacaggtgaagaaacagaggcagagaaggaaggtgacttgctggagttcacaggctactttgtggcagagttgagacaggacctgtggctcttgactcccaggctggcaatggcaaccctgaaagagggggtgttaagcctgagtgccaagtgtttctcatttggtccccgcacagtagtcattaaaacatgttcactgaattgaaaaaaacaaattgccaagacatagtcttggtacaccctaatcctgccctggttataaaaaagggatctacaaactagaaatctctttttttttttttttttttttggaggctggggatgtagagtctcgctccgtggtccaggctggagtgcagtggtgtgatctgaggtcactgcagcctccgcctcccggattcaagtgattctcctgcctcagcctcctaagtagctggaattacaggcatgtgccaccgtgcttggttaatttttttgtatttttagtagagaaggggttttgccatgttggccaggctggtctcaaactcctgacctcaagtgatctggccaccttggcctcccgaagtgatgggattacaggcgtgagctgccacccccggcctggaaacctctgtttctatcattctgttacttcctcatctagaacacaggctctccaaagtgaggtactctgtgttccatttaattaatgtcataataatctattgatgagctattttgtaatggatgctggactgagtaccttggacagatgcttccatggactcttcaccaaatcagaaagtaggcattgttaccctcatcacagatgaggaagtgaaactcagataaattaaattcagatcacacagtgggttagtggttgtgtcaggatttgaacccagatctataggctcctgaggaacacatgtgcagtaaagccttttgcaacgtgaaagttaattgcggagggttcctgtctgcacacctgcatctaagttgacctgtgtacaggggacacagggtgggaagaccccagtgtgagaagcgcagtagagagggagcgattcttttcaccttggcatggccccccaggcttgctcaccacccagactccctacttcaagcacaattaacaagctctctgtggtcagctcagaacccgtgcctggcaggggcaggcagagccttgccagtgggaagcacgtggcaaggaagctgccaggcagagggcagaggaagaggcaggaggtgccacagtgccattccaatataaaagaaaagaaaaaggaaaaacaaaaaagccttagcggttcttggctccaaatcccaatttgcatctcatctgggagtcatttgcataggaagtcctatcggtagctttatgaaataaaataaataaaataaatggccgataaggctgccaagcagactcccataagcctgtgctctgagagggaagtgattgctttgttgggttctgcatagagtccccaggagcccctccctgccaggctctgggtgggtttgggggaagggcaggtttctgggcccaggttctggaggaagcagacaagtcagacacacagtcggacagccacctggatgcaataaaagcagaccatgttcccaccaggaaacgattctgcaggtttctctagaccttctgtgctgacttgacgtcagcagcatcttcggtgaagggcctgctccttcctcccaagccctgctgggcttccgggctggctcctgtgctcccctcagcagcagtcctcggtgctgagtgggaggatgatcctgggaagcttctcccggtgaaggttcctggatctccttgccaaggctgctgtggtatgtcgggaggggatctcaggaatctgtaccaccagcttgcggctggggggtggggagacaccctctgaggaccctcttccaaggtgtgagctggaggagctattaatagtaagatgccgggtgttccctgcagggtgacagggcagctgtgcaccccaccaagccctgaccagcatcctcccacaacctgtgaagggtctcgtgcatcctcccacaacctgtgaagaagagatcaccaacttcttgtgaccagtgaggaacagacactcagggcaaccggggcctgcccaagtctgtcagccagggagcaggaggtctgatttaaaatctagctcttcagtctcaaaaggctgctgtttttaggaagagatccctgcaaatgaagccacaactctacttgcagagttttgaggcaactgggtcagagcagaatctgtaaccttgctagggaagccacgtcagcagagcccccccatgatctgatactgacatctggagggacagagccacagccagagtcacacagcccgccaaggtgggcaggcccctgtctaagagctgttacaaaagccatagtgaccccagcttgggtgggaaatggagagatccaccccttccctgagcccagagggtcttctcacagtcaaagagagtttaacagtgttggcctgatgccccttaaacatcatctagtttatgttttttcattccttttaaagttttcccattttcattagttgattttactttccaccctccctgcagctctcagggaggagggagcacacagctttttagacaggtcagggtggggacccagtctcctgccccccagcccaaagctgtctacactggccttgctcctctttggctctgctcgagggccacctgttgtcactgtttgcacagctgaggcatgaagcatagcagtgattagtgacccacagtgggtttctaagcctgttcaccctcctccatagtcaagtcagaggaggctccctccaagcgagggacggaggcaggagagcacagccgtgggcctaggccggaagatggcctggaggtgcctcctcgtgggccagtcccaccctctcccttgtggccttcaaggaagtggtcctgagggaagatggtgctcagctggatggggactcccgaatgaggcatcactgctcacctcatcgtgtcctttacaggagagcagctgagcacggatgggtggtttggagaaaatgggcaagaaagctctggagttttgcccaactttattcagagcagaatagaaatgcaggtgaattggaagaatttggtgcggagcctgaggggcctccggcttaaggctggggagcagaggccaaagcctgggccagcagttgagcaatcagacaacacaactctgtgtgtgtgtgtgtgtgtgtgtgtgtgtgtgtgtgtgtgtgtgtgcagggtggctaggggaagacaaagtgaattagggtgggaaaatcaaacaggtcaggagagactagaacctaattctacctttgtcactcattggctgagcggcctcagacaagcaatttaagtgaccttcagtttccttttctgtaaaattgggatcatgcgtatcccaacaagtcctatgtagattttaggagactgtttccctgatggtgttgaatttgaatgagagactacataccctattttccttttttggcaaaacagtcatcattttcaattcaacaaacatatgagtagttattctacatccagcccaatcttaggtgctgtgggggagacaacaggtaagagatgatgccggcccttgtctttcaaaattagaggcttgagaataacgaagacaccagaatctgtttttcctttttgttttgttttttaaacagctgtgctgagatgaatttacataacatataatgcacccatttaaagtgcacagtgtaatggtttttaatgtattttaatgtatttaaccgttaggcaagcttcatcacaatcacttttccaattttttcagcaccccaagaagaaagcccatccccttgagctatcactcctcattgtccccattcatcccagcccctgccaactgctcatgtactttctgtgtctttagatttgcggattttggacatttctcttttttttggagacggagtcttgctgtgtcactcaggctggaatgcagtggcgtgacttgactcattgcaacctccacttcccgagttcaagtgattctcctgccccagcctcccaagtagctgggattacaggcgcccgccaccgtgccaagctaatttttgtatttttagtagattggccaggctggtcttgaactcttgacctcatcatctgcctgcctcagcctcccaaagtgctgggattataggcgtgaagcactgtgcctggcccttggacatttcatttaaatggaatcagacaatgtgtggccttttgtgtctggcattcttcacatggcataatgtgttcaaggctcatccgggttgtagcgtgtgtcaataattcatttcctttcatggctgaataatattccattgtatggctctaccacattttatttgttaatcagttcatagatatttgggtttttttccactttttgtctattatgaatgatgctgctgtgaacattcatgtatatgtttttaggtggacacatgttttcgattctcttggatatatacctaggagtagaattgctaatcatatggtaaatctatattttatcctttggggaactccagactgctctccaaagtggctgccccgttttacattcccaccagcaatgtatgagggttctaatttctctgcattctgtctcacatggttttgatttgtatttccctaagtctaatgatgttgaggatcttttcatgtgcttactgaccatttttatatcatctttggagatctgtctgttcagattttttgcccctttttaattgggttatttgtctttttattaagttgtaagagttctttctatattctaggtataaccccttatcatttatatgatttgcaaatattttctgtcattggtaggctgtctttttactttcttcacagtgtcctttgaaggaacacatctgaatccgaactgcaaacgatgtcagtgttaattacaatgaaacatcattaatttggactctggtaatttggaatgggtcagggcagaggttcaaagtttattctttcaacagttattgagactgtctatagtcaaagactgtgccaggccctgggggtagagaggtgaacagagctgagtcctgcctttacagccacagtgtgtggtgaggagaacacaattgcaccatgggagccaagggcctgagcgctaatggcagagccaggtgctcagggagccctggggaaggaagagctaactgtttaaaaagcatttactcggtggctcacacctataatcccagcactttggaggccgatgtgggaggattgctagagcccaggagttcaagatgagcctgggcaacctagtgagacctcatctctacaaaaaatttgaagaaaaataaaatagccagtcatggcagcacttagtcttagctacttgggaggctgaggtgggaggatcacttgagcctgggaggctgaggctgcagtgagtggtgatcacaccactgcactccaccctgggtgacagaggcaagcaagaccttgtctcaaaaaaataaaaaaacaccaaagataataaataataataataataataataaaaataatttactatgcaaatcaacaatgaaaactatttaggaaaagagcctgcttgtgaaggtccctcaagcctttatggcttttatttccatgctaacagacaatgtgattggccttgccctcctaccctccagggagagttggggtggatgccttctgctgctcctggaagagtctaggacattttatcatctcatgatagcctggtaggtaaactattattgtcaccatttacagatgaggaaactgtaacttggggaggttaagtgacttgcccagagtgacaattactaatttttgagattaggattaggacagaggtgttctgtctccagcatcatgagactctgttctgtgtgttggactccagacctgactggatcccagcagtgtaagcttggtgtccctcatcaggtaggactgatgctatctgccccaggatggttgagcacttggtcacctgcaccaccctaaaccaatatatggcattgctgttgcaacgttggtttctccaggctacaccacccttaggaataatagtctgaaggtatattttcatttgtcagacatgtgtgtgcccacgctatatactatgctcctccccctccagcaagatggctgggaccccatgtcctagcctgctcttgcccctctgtggatcccaggggctctgtgcccatctctaactcttgacccttaaggcctctgtggtgttctgatgggggtaaaatgttccccagtgtcctgtgccacatactgccctacagggaaggaaactgggctgccttaaaagcctagtatcctaaagaaaacccctctcttgtttgtggttgttctttattgcatgctctctaagacttggctcaaagggctgaggtccatgagccatactggactccaaattatttctcttcctgtcaactcttcataactcttaaactaagtttaccatcactgccttttgtctcttgtgcaaatggaccccagtagtctcatcctgtggatcttccatattttccattgatctataggggacacagagctcagatcctgacactgagactcctggatgtttttattatttaagaggcagggaataagtataggggagcatccaggccctgaggctgggacacaggtggggctgtccctggcagcttctctgcaggctttttgcagcctggataactcatctctctttcaaccacctcccactgtgctgtgcacctgcagccagcccagccagcccctgcccagcttgcctcctgcctgaagaacacaggtcagtggagctgatttttctgatcttgaaggaggtgaaggatttcacccttgagtgaatcaagtgtgtgctcatcagtttgatggcccgtgagtgtcttttctcactgacacagcagcagcatcgtggagctgcctcctcactgagcagggtaagagactcccagagttggcctgagaggttttggaggcacacacttggccactaggagccaccagccccacagagatactgctggactccctgaaagcagcctctagggagataaaaatgtcaagggccactgggcagcataagtgaggttgtgtctgctgggccaggatacctgccttggggcgtccagaaggtggtgtggccaatgggagtagcatgggcttttagccaaacctcagctctgtctctctctggctgtgtctttgggcaagttctctgacttctctgagcctcacgtgccttatctgtgaaatgtgggtgatagtactacctgtcacacggtggggttgggaggcaaaaagacttagagtatggaaaatagcaaggatgacatgtggcccagggagggctcagtagccattaatatctctttctagagaatctgtccacctccacagctgtgaaagggagaagagttccctgggtctggcagaaggcagtgaaacctcaatctcttccagacccctatattttatttttttggatttcaaaatagggcttgggctctagaaatactggtttgccgaattgggcatggagccaccagttctccctcagtgatcaggggccgttactaagtctcagttatctgcggaggagagtttggattgggggattccatgggattccttccctctgggcttcggagggcaggatcactccgttcccaccccgcacagggtgtgttgggaaaacatgaagggaacctgaagcttcagcttctccactggagcagtccttggctctgcctcagtgagagactgcaaattatttacagtccatgggattgatgatgtagagactgatgtccaagcttcttggattggttttagctcctagcccaggagtgggcgttaggctgagatgccaagtggggatcacttggcccccaggtgacccctctgcatccatttccctgggcattccttaaggctcagtgcagcacagtccatgcccctcacaccactctggaagcaaggtggcacacgatcccatgcagcagaacagtgggtgcaagaccctacacccctctctttcactctgcttcattgcacccatcctgaggacctggggggcccctgtgcctaacatctgtgattctggagtctttagcaaatcagttgatttctacggatacctcagagggcttcttcatgctctgcctctacgtttgtcttttcccaaaggccctaagccagtaggtttcataaacttttttttctttttttccagctctagagtctcgtaagatgctacttggtttagagaaaagtgtgccatcaaataagtttgggaaatgctgcattttatatatattcacctcttagaggctcataaccagggctccagcattgcccacctcccgtggcaccattgcagggtcagcactgtaaccgtgtctctgagaaatcccgtagtaaaggccactgcttagaatcatctaaatgattcttgaaattatttaggtgttacacctggaacttctaataacaagagggtgaccatctattaataatatatagtctattcaggacactggagtgaaacattacagaagacaaagggagagggcagctaaaaataatcaccagctgttaattggtctatagtgggcatctataaatgggagtgtcttggtgtcttatctaccaacttctcaagggacactggtattccgtgaaacatagtctgggaaatgctgttccttgtgcagtttagtcagcacctaattgccaggcactgtgctaggcactggggatacagtagagaacaagacaagcatggccttggcttatatccaagactagcagggaaggcagggataaacacataataatagataagtgatgtgtgttacaaaagagagagtcaagggtactgtggacagggatggtgcatagcacagggatattacttcgtccaggaggccacaggatggccttcctgtgacactgctatttattttgaagcttgatagatgagtagtagaagttagccaggcaagcaagagctggggagtggagagctttctgggcagagggaacagtatgtgcaaatggtcagggtcagagagaagcttttggttgcaagtcacagaaaactaaaccgaaagcagctaaaatgccaagtaaatgaattggcttccacagtaggaggtctagaggcaggcaggggccagggaggctgtcagcattgtttgtcctggtggctcagggacatcagattcaggctttccagtctcttcactccactgtccacagcctcagctttctcccaagattggctttctctccaagattggcttctcccaagattggattccctttgtattgtattgtgggctatcagtagcattttttttttttcaagtctaacatgagagtaagaaccaaagtcttccctcaagtcttaatggggccaatctggctcacttaaccaccctgaactgattattgtcatgggggaatgcctggctctgattgacttagtctgggttcttaaaagcaaagcaaaacaaaacaaaccaaaatactggtaagggaaatgggattactgtgattgacttagacccagcgattggcagagtttttccatgaagggccagatagtaaatattttaggctttgtgggccatatggtctctgttatgacttctttttttcctagaatctttttttaaaataaattttttattgtatatatttgaggcttacaacatgatgttaggggatacatatagatagtaagatggttgctatagtgaagcagattaacatgtctattatcacacatactttttatgacaagagcagctaaaatctacttatttaacaaaaatctctaatataacacactttatattagagatttttgttaaataagtagattttaatcctcacattgtacgttaggtctctaaacgtgttcatcctacatacctgccattttgtattcttagacttatgtctccctattgtttcttctcccccttatccccacctgtgataaccactgttttattctctgtgtatgtgagttcttctttataaaaatattctacatataactgagataatgcaatatttgtctctctgtctagcttattcacttagcatattgttctctaggtccgtccatgttgtaacaaatagcaagatctccttttctaaagttgaataatatatatatacacacaatggaatattttatatatatataaacatatatatacatatatataaacatagatatacatatataaacatatatatacatatatatatatacttttcttttttattatactttaagttctgggatacatgtgcagaacgtgcaggtttgttacataggtatacatgtgccatggtggtttgctgcacccatcaacccgtcatctacattaggtatttctcctaatgctatccctcacctagactcccaacccccgacaggccctagtgtctgatgttcccctccctgtgcccaacgttctcattgttcaactcccacttatgagtgagaacatgcagtgtttggttttctgttcctgtgttagtttgctgagaataatggtttccagcttcatccatgtccctgcaaaggacacgaactcattctttttttatggctacacagtattccatggtgtatatgtgccacattttttttttattcagtctgtcattgatgggcatttgggttggttccaagtccttgctattgtgaatagtgctgcagtaaacatatgtgtgcacgtatctttagagtagaatgatttacagtctttgggtatatacccagtaatgggattgctgggtcaaatggtatttctagctctagatccttgaggaatcgccacactgtcttccacaatggttgaactaatttagactcccaccaacagtgtaaaaacgttcctatttctccacatcctctccagcatctgttgtttcctgactttttaatgatcgtcattctaagtagcatgagatggtatctcattgtggttttgatttgaatttctctaatgaccagtgatggtgagctttttttcatgtgtttgttggccacataaatgtcttcttttgcaaagagtctgttcatatccttcgcccactttttgatggggttgtttgtttttttcttgtaagtttgtttaagttccttgtagattctggatattagccttttgtcagatggatagattgcaaaaattttctcccattttacaggttccctgttcactctgatgatagtttgttttgctatgcagaagctctttagtttaattagatcccatttgtcaattttggcttttgttgccattgcttttggtgttttagtcatgaaatctttgcccatgcctatgtcctgcatggtattgcttaggttttcttctagagtttttatggtttcaggtcttacatttaagtgtttaattcatcttgagttaatttttgtataaggtgtaaggaaggggtccagtttcagttttctgtatatggctagccagttttctcaccaccatttgttaagtagggaatccttttcccattgcttgtttttgtcaggtttgtcaaagatcagatagttgtagatgtgtggcatgatttctgaggcctctgttctgttccattcgtctatatatctgttttagtaccagtaccatgctattttggttactttagccttgtagcatagtttgaagtcaggtagcatgatgcctccagctttgttctttttgcataggattgccttggctatacggactcttttttgctttcatattaaatttaaagtaattttttctaattctgtgaagaaagtcaatggtggcttgatgttaatagcattgaatctataaattactttgggtagtatggccattttcatgatattcttcctatccatgagcatggaatgtttttccgtttgtgtcctctcttatttccttgagcagtggtttgtagttctccttgaagaggtccttcacatcccttgtaagttgtattcctaggtattttattctctttatagcaattgtgaatgggagtttgctcatgatttggctctctgtttgtctattattggtgtataggaatgcctgtgatttttgcacattgattttgtatcctaagactttgctgaagttgcttatcagcttaaggagtttttggactcagacaatggggttttctaaatacacaatcatgtcatctgcaaacagaaataatttgacttcctctcttcctatttgaataccctttatttctttctcttgcctgagtgccctggccagaacttccaatactgtgttgaataggagtggtgagagagggcatccttgtcttgtgctggttttcaaagggaatgcttccagcttttgcccattcagatattggctgtgggtttgtcataagtagctcttattattttgagatacgttccatcaatacctagtttattgagtgtttttagcatgatggggtattgaattttatcaaaggccttttctgcatctattgagataatcatgtggtttttgtcattggttctgtttatgtgttggattacgtttattgatttgcatatattgaaccagccttgcatcccagggatgaagccaacttgatcatggtggataagcttcttgatgtgctgctggatttggttcgttagtattttattgaggatttttgaatcgatgttcatcaggaatattggcctgaaattttctttttttgttgttgttgtgtctctgccagattttggtatcaggatgatgctgggctcataaaatgagatagggaggagtccccctttttctattgtttggaataatttcagaaggaatggtaccagctcctttttctacctctggtagaattcagctgtgaatctgtcttgtcctgggctttttatggttggtaggctattaattactgcctcaattttagaacttgttattggtctattcaggaattcaacttcttcctggtttagtcttgggagggtttatgtgtccaggaatttatccatttttttctagattttctagtttatttgcatagaggtgtttatagtattctctgatggtagttcgtattctttgggatcagtggtgatcccccctttatcattttttattgtgtctatttgattcttctgtctttttctttattagtctggttagtggtctatctattttgttagtcttttcaaaaaaccagttcctggattcactgatttttggaagggtttttcatgcctctatctccttcagttctgctctgatcttagttatttcttgtcttctgctagcttttgaatttgtttgctcttgcttctctagttcttttaattgtgatgttagggtgtcaatttttagatctttcctgctttctcctttgggcattttgtgctataaatttccctctaaacattgctttagctttgtcccagagattctggtacgttgtgtctttgttctcattggtttcaaagaacttatttatttctgccttaatttcattatttacccagtagtcattcaggagcaggttgttcagtttccatgtagttgtgcagttttcagtgagtttcttaattctgagttctaatttgattgcattgtggtctgagagactgtttgttatgatttccattcttttgcatttgctgaggagtgttttacttccaattatgtggtcaattttagaataagtgctatgtggtactgagaagaatgtatattctgttgatttggggtagagagttctgtaggtggctgttaggttcgcttggtccagagttgagttcaagtcctgaatatccttgttaattttctgtctcgttgatctgtctaatattgacagtggagtgtcgaagtctcccactattattgtatgggagtctaagtctctttgtgggtctctaagaacttgctttatgaatctgggtgctcctgtattgggtgcatatatatttagatagttagctcttcttgttgcattgatccctttaccattatgtaatgtccttctttgtcttttttgatctttgttggtttaaagtctgttttatcagagactaggattgcaaccctgctgtttttttgctttccatttgcttggtaaagcttcctccatccctttattttgagcccacgtgtgtctttgcatgtgagatgggtctcctgaatacagcacaccgatgggtcttgactctttatccaatttgccagtctgtgccttttaattggggcatttagcccatttacatttaaggttgatattgttatgtgtgaatttgatcctgccattatgatgctagctggttattttgcccattagttgatgcagtttcttcatagtgttgatgggctttacattttggtttgtttttgcagtggttgataccagttttttgtttttgttttttttttcctttttagtgcttccttcaggagctcttgtaaggcaggcctggtggtgataaaatccctcagcatttgtttgtgtataaaggattttatttctcttttacttatgaagcttagtttggctggatatgaaattctggattgaaaattcttttctttaagaatgttgaatattagcccccactctcttctggcttgtagggtttctgcagagagatctgctgttagtctgatgggcttccctttgtgggtaacccgacctttctctctggctgcccttaacattttttccttcatttcaaccttggtaaatctgacgattatgtgtcttggggttgctcttctctaggagtatctttgtggtgttctctgtatttcctgaatttgcatgttggcatgtcttgctatgttggggaacttctcctggataatatcctgatgtgtgttttccaacttgattccattctccccgtcactttcaggtacaccaatcaaacgtaggttttgtcttttcttatagtcccatatttcttggaggctttgttcattccttttcattcttttttttctaatcttgtcttcacactttatttcattaagttgatcttcaatctctgatatcctttcttctgcttgatcggtttggctattgatccttgtgtatgcttcactaagttcttgtgctgtatttttcagctccatcaggtcatttatgttctttcctaaactggttattctagttaacaattcctctaaccttttatcgaggttcttagcttccttgcattgggttagtacatgctcctttagctcagaggagttcgttattacccaccttctgaagcctacttctatcaattcgtcaaattcattctccgtccggttttgttcccttgctgacgaggagttgtgaccctttggaggagaagcagcattctggtttttggaattttcagcctttttgtgctggtttttcctcatcttcgtggatttatctacctttggtctttgctgctggtgaccttcagatagagtttctgtgtggttgtcctttttgttgatgttgatgttgttgctttctgtttgttatttttccttctaacagtcaggcctctcttctgcaagtctgctggaggtccattcaagaccctgtttgcctgggtatcaccagcagaggctgcagaacagcaaagattgctgcctgctccttcctctggaagtttcatcatagaggggcacctgccagatgccagctggagctctcctgtatgaggtgtctgtcgacccctgctgggaggtgtctccccatcaggaagcacaggggtcagggacacacttgagaaggcagtctgtcccttagcagagcttgagcactgtgctgggagatccactgctctcttcagagctggcaggcaggaatgtttaagtctgctgaagttgtgcccacagccgccccttcccccaggtgctctgtcccagggagatgggagttttatctataagctgctgactggggctgctacctttctttcagagatgccttgcccagagaggaggaatctagagaggcagtctgcctgcagtggctttgcagcgctgtggtgtgctccacccagtccaaatttcccagcggctttgtttacactgtaaggggaaaacctcccactcaaacctcagtaatggcaaacgcccctccccccaccaagcctgagcatcccaggtcgacttcagactgctgtgctggcagcgggaatttcaggccagtggatcctagcttgctgggctcagtgagggtgggatccactgagcaagaccacttggctccctggcatcagcccccttttcaggggagtgtacggttctgtgttgctggcattccaggcaccactggggtatgaaagaaactcctgcagctagctttggtgtctactcaaatggctgcccagtttcgtgcttgaaacccaggggccttgtggtgtaggaacccgagggaatatcctgttctgtgggttgcaaagaccatgggaaaagcgtagtatctgggccaaatatcaccgtccctcacagcacagtccctcatggcttcccttggctaggggaggtagttctctgaccctttgcacttcctgggtgagacgacaccccaccctgcttctgcttgccctctgtgggctgcacccactgtctaaccaatcccagtgaaatgaaccaggtacctcagttggaaacacagaaataacctgccttctgcgttggtctcgctgggagctgcagactggagctgttcatattcagccatcttgcccaggaatccgtgtattatattttctttatccatttgtctgccaatggatatgtaggttgtttccatatcttggctattgtgattaatagtacaatgaacatggcagttgaaatatctttataaggtagtgatttcatcttctttgggtatatacccagaggagggattgttgagttgtatggtagttctattttttatttcttggtgaacctccataccattttccataagggctgttaccaattcatgttcccaccaaacagtgcactagaggtctcttttcttcacacccttgccaacacttgttatcttttgtctatttgataatagccatttttacaattgtgaagtgaaatcgtggttttaatttgtatttccctgaggataagtgatcttgagcactttttcatatatctgttggccatttgtatgtattcttgggagaaccatctgtttggtcctttgcccatttttaaattgggttatttgtttttctgctattaatttataagagttttaaaaataaattttggatgtcaacttcttatcagatatgtggtttgcacatattttttttcccagtctgtaggttgccttttcattttgttgtttattttgctgtacagaagctttgtagtttatgtagtcccatttatttatttttgcttttgtagcctgagcttttggtgtgctatccaaaaaaatcattgttaaggccagtgtcaaggagctttttctttgtgatcttttccaagagtcttatggtttcaggtcttacatttatgtcttctatgcatttcgagtttatttttgtgtgtggtgtaagataagggtccaatttcattcatttgcatgtggaaatccagtttttcagcaccatttattaaagagactatcatttccccattgtgtcctcttggtgcccttgtcaaaaatcagttgactgtttatgtttggattcatttctgggttctccattctggttccattggtctgtgtttctgtttttagccagtaccatactgttttgattactacaactttgtaatataatcttaagtcaggaagtgtgatgcttccaactttctttttctttctcagtactgctttggatattaagggttttttttttttgtgatcccatggaaattttagggttgtttttctatttctatgaagaatgtcattggaattttaataggggctttattaaacctatgtattgctttgggtagtatgggcattttaacaatattattcttattcattaacatgggatatctttccatttatttgtttatcttcttcaatttctctcatcaacatcttatagcttttggtgtaaaaatttttcacctccttgattacatttattcctagatattttgttttttgatgctatcaatttttgtgggatcattttcttgatttctttttcagccaagtcattatttgtacatagaaatgccgctgatttttgtttattttgtatactgcaactttactgaattcatttattctaacagttttttttgtgggttaaaactttcgagttttctacatataggatcatgtcgtctgtaagtaaagatcatttgaatttggatgcctttttatttttattttttcttatctgattgctctggctagcactagtacttttcatactatactgaatagaagttacatgggcattcctgccttgtaccagatcttagtagaaaagctttcagttgttccccattgattatgagtttagctatgggtttttaatacatagcctttattgtattgaggaatttttcttctatacctaaactgttaagaggttttatcaagaagggatgctgaactttgttaaatgtttttctgcaccagttgagatgattgtgtggcttttatctttcattctattaatgtgatgtgtcatgctgattgaattgcatatgttaaaccagccttgcatgccaggcataaatccaacttggtcatgatatataatctgattaatgagttgttaaattcagtttgattatattttattgaggatttttatattaatgttaattagagatattggcctgtagttttcttttcttgcagtgtctttatctggcttaagtatcaaaaggatggtcttgtaaaatgtatttggacgtattccctctagctgtattttttggaagagtttaagaagccctggtagtaattcttccttgaatgtttggtagaattcagctgtgatgccatctggtcctggggttttctttattggaaggtttttaattacttcagtttctttatttgctattggtctgttcaagctttctgtttcttcctgattcaatcttggtaggttacatttttctaggaattttttcatttcctctcggttgttcagcctctaggttgaaaaataattgttcaaattgttcataatagtctctatgattcttttgtttctgaggccactacaacttttaaactttgccattatagcacaaaagcagctatagacaacacataaatgaatgaacatggctgtgttccaataaaactttatttgtgatattaatattttaattttatataattgtatgtgtcatgaaatattcttttgactttttcccaaaacattaataatgtaaagacaattcttaacttgcagaccacatcaaacaaagacatgcacacacatacaaacaaaaaacaggtggcaggctagatttagcagatcatagtttgctgacctctgacttacactaataagagctcattcctggagcgtggtttcagtccctaaattatgttgctgttgtataatgaaggagacatggaatggataggaagtcaacttcagtatgctctactaacagcttggtgtttttgagggtctgcaagaagtgtagtttagctgggactgtggacagtgaggcttacaacatctgtgtggtgctccatggtggacaaagcctgcaccaacagtttctgggcaacacttctccctatctgggaactgccatgactccctcccagcttaaccaatatataattaattctttaaaataatggcaatgggctgagaaatatttccctcacttccaggtaacacccaaacccatacattttagcagggccttcctgctcccacttttgttgttagacccagaggagttctgcaattagtcagttagtccgtaagtagtcattgaaacacttactagctttgcagtccccatgggtgcaatagggaagcaaaggaattgaatgatcctcctatatagtcaaggcatggcatacaaaacatacacacaaaaatcttcccaaattctacagcacagagctgcctgggtgatggtggcatgataaaattaccttaactcccagcatctgtttatgccacatagtgaaagttaatgagggctgaccctcagcaaaactgggaagtcacccaaagttaagcttctggctctagccatcctttctaaaaacacgttacctcttttagtggcaaactgtttctcagtcccatcactgtatcaggccctgtctcttctctgaccttgctccatcctttataaacaaagatctgccattggccagtcctacttgaggctggctgacaaggtatactttcttttggatgaatttcatttatttgttctcttatgctatgtatgcatttaagtattttgtgcctaattctatattttatgcagtgagagactttgactctggggaagtgccatggtctcaatgtttgtgtctgccccgcccctgccaaactcatgtatacttaacctctaatgtgttagtattaggaggtgaggactttgggacatgattaggtcatgaaggtagagcccttctggtgggattcgtatcctataaagcaagtcccagataattgccttgctctttctaccatgtgattatacagctggatgtgctacctatgaaccagaaagcaggccctcactggacactgcatctgccagcactccataactgtgagaaatgaatttctgttgtttataagtcacctagtttatggtattttgttatagcagcccaaatggactgtaacagaaaattggtaccaagaagtgagggtgctgctctaacaaatacctaaaatgtggagtcaactttggaactgggtaatgggtagaggctggaagagttttgaggtgcatactagaaaaaacttacattgccaagaacagactgttaagggtgatcctgatgagggctcaaaagaggagaaccacagagaaaacttcagtctttgtagagattagctaagtggtcatgaactgaatgttggtagaaatatggaagatagaggccatcccaatgaaatttcaggcagaaatgaggaatatgttattggacaatggaggagtggaggagaggacatccttcttataaagtggcaaagaatgtggctgaattgtgtttgtgttctaatattgtaatatagaaggtctaacttgtgagcaatgaaactggatatatgactgaggaaatttctaagcaaagtgttgaagatgtggcttggcttatgagtgcttatagtgatattcgagaggaaagaaatggaacaagacagaacttacaatcaaagggaaaggagaatttaaatatttagaaaatccccagtctatctgtattgtaaagaatgagaaagtgtgttgagagagaacactaagggtgtaaacaggtaactctttgatagggagattggtatgctatctcagtggaatccaggacctattatacaagacaatggaagaatgacccataagacatttcagggatcatcagcacttatctccatcactatagctgccccaggtgtggctccagtgggtgcaggtatgtgggggcatagctgccttcacctagatttcaaaggatgctcttgagagccatagagctcaggcagaaaattgctgcaggagtgagatcaccatggagaacccccacttgggcaattgcccagtagaaccacaggggtagaactaccctcatgatcacagattggtagaaatggcagtgattctagtccagaggagcttcaagcatgtgacttcaacctctgagggctatagtgtgggttgtacccaaaaaagccaaaaggacaggactgcccaaagcctttggggcaggaccactcagagccttgtgggctcagcctctgccccagtgtgtctagaaggcaggaactctgccctaacaggtctagcggccagagccttgagtcagaagattattgtcttagttcattcctactgctatttaaaaaacaaacaaacaaacaaaaaacaaaaaaaaccttagaatgagtaatatataaagaatataaatttattatatttctcagaattccagaggcggggaagtccaagattacacagccagtatattagatgtctagtgagggcctgtttcatgcatggcattttctcctggcatcctcaaataaaaattagattttcttgagcacctactgcatgctaggctctgtagtaagtaagtattggggatgacaagaggagaactactgtatattccccatcctctgttatcatgcagtgattaagagccaggatgggaattagggcaggaaacagtggcttagtgccttcaactcaggctaaggaggtcaaaaaaggagatggtctgcaagcttgaactaggctggtaggtgagaacaggtggtgtatgtgcgcgtgtgtgtgtgtgttacatgggagaaatgagaacattttatattgtggggagaaggagagaagggaagatgaagttttgggagagagggcatgggaagaaaggggaaggaatgggatctagcatgctgctggaaggattggccttacacaggggagggatacctcttccctgggacagaagggaaagtgggtccaagtgctggtgcattcattcattcattcatctagtcatctagtcacatcaactcattaaatatttattgaatcctgtgattggccaatattactatgctaggcaatgaggatataaagttgacaataataaattcagtgcatatttgttgagcatctagagattgagtactattccaacaataatagcagtattattgaggattgatcatatgcctgtttttgtttgaaatttttccatattttatttaatcatcataacagtagatgttgatattttcacttgtttttgatggtcaaactgggacatagagattaggtaacctgcacaaggccacatggctaagaaggagcagagacagcctttgtgtctagtcagcctgtggtctgaagcccacccttgtacccatcaaatgttctgcctcaagaagcttgtctagcccagctggagtagacagatacacagacaaataattaaaatacagcagatgtctatttccgacagtgtggttgactagataatatgaaaactcctcttctataaaataccaggaaatgctggataaaatgtaataacaaacatttttgagaagctagctgagcaagaaggagcaacaggaaaaccaccagggaccaaacacggagagaaagctgaaagctgaagtggtaagcgtgcgaatggatgcagtggcagcctggagtggggaagtgggggtgttgctcctcaggaaattccagggatttggattttattgttcaaggaaagataggaggcaaaaccttggaactgtgttaggcgagagttagaattgagaaccccacataaaggcagtgctttcaaggccacgcccttggtgaaatgaggactgtaaaacagctgactcataggtagaggggataaactgggctctgagttagaaaaaattgtcccctgggactttataaccacagactactctcaaagggtttgaagtttaaacttataccctctgctggtccaagaattaccaagttaaaacatttgtatagaaagtggtcacaggctggtaatgctcctgaagtttctgacagaagcaaaacaaaaccctcaagtgaacaaaccatctaccttggccacaaaggattcccacagaaaaagccccactgacaatgagctcgcaatccaaaattcaataacaaagaggaaagcaacccctgcaaatgagtcagcagaagctacaaacatcaggattagaccctcagaaggtacagccaattgcgtcaccagacagagctgatcacagcaccatctaatcattttttcatgctggaaggatgctgagtctaggagaaagagctctgcctggaggagccagagaagggctccccaggtcatgtttgagcagatactgaagaattggtaggagtttgcgaaagggagtgctagggaggtggctttagggttagagagctgtgtattagggttctttagagaaacagaaccagctctgtgtgtgtgtgtatttgtgtgtgtggagagagagattgagactgactgatattaaggaattggctcacatggttatggagactggcaagttcaatctgcagggcaggccagcaggctggagacccaaggaggattgcaggtcaggtcaaaaggcagaagtctggagacagaattccctttttggggggacctcagtctttttcttctcttaagtaagtccttcagctgattggataagacccagtcacattatggagagccatctgcttcacccaaagtctactgatttaaatgttaatcatataaaaaataccttcatctagactggtgtttggccaaacattcaggcactgtagcctaacccaggtccttatagtctgcattctctctgtgaatagggaggtggggtgatctgtggaggggaaagatatcagggtggctgggaagccgaggggagtggggactctgagctggtaatggttaagtccgttgacaaggctgctggaccatttgggggcccagctgagtgtgagggagtgtgtgaatacacgcatgaacaaatagaaacctaaatgacagcagagggcctactgatgcggcatgagtgacactctaccacaggggtgagagacgagataaagatggggctaggcacagagaggtgtgtgtgtgtggtgtcagatgtgtggaggcacccagcaatccttccttcccttcccctcctctgcccttggcatcccagaggggcagtttatgttttcagcacttctaacttatgtgagttggtgtttaaggagggccttgtaacatggctccttcttgtccactgtcctggaaaacaccctgggcctctgtatttcttctgcctctggtctgctggcaagcccagagctccggctgttaagaacctgccctccattgaagaatctggactcatacacatgaaatggcacacaagccatacaagagagcccccctaagtggtgaaatgtctgatgacggggaggaggaggaaggacctgagagacacagctgggttgggcagcaagaggacagggaatcaggcagcctgggttctggtcccgactcttccctttatcactgatgtgacttgggtagagtccctacctctcagaccttacagggctatcttaggatctaacatgttcatgaatattgaaagtgttttggaaagtataaaacatgaccataatgacaggtactatttggaaatgcttactacgtgtatggaacaaagaaaaagagaatttacagtgtactgattaggatggggcagcgatgagatttttacaaattatcctagcaggaagaccttgactaatacccgtcatattcagagcctgtggccggcactttctttgcagtttcttatttaaacctgatgacaatccgacaatcctgatgagaactcttggttcagaccaatcaaataacttgcctaagggcaaaaactaaatggtctagctgaaattggagtttgtgagagccaagctcagggcttccttaccacacggtgctacctcttggggtatttgtgagatacttttattattaccactggggtcaggctgagccctcttttgccacctggttgcccctagagcctcccctggcaggctgcatcctgcagtggctgattgggaagccttccctgagaaggcatctctcagtttgactaaggacctgggtacctacgaccttcttaaaagtgttaataacacttaataaatgtggcggagaaaggtcagcctcccagtgttgtgccaataagagataaacctgcccagaaacatctgctctctgttattgttgtgcagacgtggctgcaatgtcctctgattagttcatgaattaagtggagggaagcagtaaaactgactgcgtgctcacatctctaccgcacctctgggaccgcgtggaccagagtgccaggtggggagagctgccagccccaggagccggaggaagggctgtgtctgccctcgctcagagggaagctgagttccaggcattctttccacctgctgggcattggagaggaggagttggagttccccctcttttttgcctgacctcattgggaatctctgattagtaacctttgtagaagggacaccctccatgtctgctgcagtctttgtcctgaaggcaggagatcactggatgctcttagaggggaattaggctgtaagaacaatgtattgctttgtaacaagttatcccaagacttagctggcttaaaacaagaacgatttgttgtctcacacagtctctgagggtcaggaatgtgggagctgcttagcgagtgtttctggcgcagggtcactctcaagctgttgggctgaggctgcagccatcccaaggcttgactggggctggaaagtccactcccaagctcagtcaaggtgttgtcgggcctctcggttccttggttcctgttggctggaggccttagcacctggcggtgtgggtctctccataggcctcttcacagcagggcagccggctctccgcagagcaagagacaagagagagaagagtccccttacatagaagtggcagtttcagaagcaacatcccatgatttctgccatgtgctgttgggcaaatcaacccccattgtgttcagggagctacgaggggggtgtgagtaccaggaggcagaggtcctcaggcatccttgggggctggctatgacgaaggcctggcaggaacctgtgctgctcgggtgatgtagggaactagaaacttcacctgcgagtcttccctcccattctaaaaacaccgacgcgggtttcttcaaagtttatctttgagataaagtccaggtccctttcaatggcttacaaggtgcttcacagccccccaatacctctaacacattttctgctcttttctccagtcacccccattccagctacacaaacagtttggtgtcatttctctgtgaccatggacctgcaatttcccttctccaaccagtagatttctatcttacaacttggtttagcccatctcctcctttgtgaaaccttcctgggcaacttcccagaaagatgggggctctcccagtgccccatagtcacattgtacctccgctccagccgccattcatgtcttacttgggaagtattgagtgagtgcccactgtgtgcccggcacggggttggggctgggggcacagcagtaaacaaaacagacacaatccctgccccggctgtagtgggggctgacagacagacaaagaagccaagaaatgtggaatgtgttgggtgttgatatacactatggacaaaaggacagaatagggctgggtgcggtggctcacgcctgtaatcccagcactttgggaggccaaggcgggtggatcacttgaggtcagaagttcgagaccagcctggccaacatggtgaaaccctgtccttactaaaaatacaaaaaggagccgggcatgatggcacgcatctgtaatcccagctatttgggaggctgaggcaggagaatagcttgaacttgggaggttaaggttgcaatgagttgaggtagcaccactgcactccagcctgggtgacagagccagactccatctcaaaaaaaaaaaagaaaaaaaaaaaggacgaaataaagtagagcagggtaaggatgaggtgggggtgctgtttcctaccctttactcagggaaggccttgccgctcaggtgacaaggaccggagaccagtactaagtgaggcattgaactgggaggatatctgggaacaacattcaatgcctatcatgttataatgatttgcttttgtttccacacaagtctgtaagttcctcgaaggcagggaccatgaatacatcaattatgtcaatttcacgtccccactgcttagcatggtagaggcctgatgaataaggaatgtgcttttgatgtgtaggagttgaaaagtgtctttgagagacaggatcgggactctaacaaacttccagaggcactaggacgctgactgggggagaaacacgagagaagataaatttgttttgtggattaaagactcattccgtttatatccctatgccttatagacaaggtgagatgaaaataaatttaaataaagactttagtttgtatttaatgatgtggttattaggctgcatttggcaatgtgtcacctgatttaaaacataaagttttaaaatcggctttttcaaacactgatttaccctttgggtctgccagctctaataataaataaagcaaaagctgacctcattaccaacagattcatggagtgggctaacatttggtagattacccagttctggatgctgagaaatgaaggccaccaaatgactaattctgatggggaattgggagctgaggtcacatttgcagccaagttcattacacaggggccgatgagcccctccttcatatcagtggggcctcagctctttctgcattcttagaacagggcagcctatggatgcctttgtttggctcaggcagctctgaagtgccagacaataaggaggccaggtgggagaaagagctgactcagaactggtgtgaggtgcctttgtgagtccagagggtgcagaacttctcagactcacggcggggctccacatctcaggccccctgctgttcagcccctgctctgagagcaccttgactgctctcctgtcagctggggaggtgagcgccgacttagtgggacaggtgcaccaggacctcagttgtgggttcattccttcatgattgaggggcaggactgcgagaaagatgtgattgactggacatgatttcctgtcctctgagaagtcacatggaggtgtgagtcctgtgacagacaggggaccgaccaaccattcttggagaaggtagtccgcaggccttctgtgagccagggcgaaggaaggtgaagagagaagcctccatatcatgtctgtccttaccctgagaggccaagcagagtgagccggtcaggagctggagaaagggcagctggtgggtgggtcccttcagaggaaagggcatttcaggatggcatcccctttaaagggcaagtaccctggttgggggcatggtggaagaagaaggtgaattgggcaaggaatcagttgactgctagccaggggcaagaaggcctgggtgccacatgtcagcaaccacaccattctggaacaagggtgaggctacatttccagcagtgggagcctgcacccagaagtcacatagacctggattcaaagtcgtggtgaaattggtcaagtgatttaaggactctattttctttatcatcatctgcaaagtaataataataataataatgcccaccatataaggcagaaaatgttggtttttccctctatacctaaatcatgaggcaggaatcttcctcaaatcaaatcattgcttctcactctctccttgcctgttttctttctcttagctaggcaggtagtatttctacatcacttagcacatgaaaggtgatttactttatagaacattccacaagcattgtgatacactagacagagcgttggtagagcaggagatctggattttagctttaattcctcaacatgtctgctgtgtgaccttgagttggggcagcctgtggatgcctttgtattggcttaggcagctctcaagtgccagacaatgaggaggcaatttttctggacttcagaatactcatctgtgaagtgggaatagtactattttactctaatctcctagattatcatgagatacaaatgagacacatgtgtgaatgtgctttgtaaactctttgggcattttaaaattatttttaattttggtaaaatacacataaaactactgttttaaccaatttttagtgtacagttcagtagtgttaactacattcacattgctgtacaaccatcaccactatctatctccagaattctttttgtcttgcaaaactgaaattctgtgtttattaaacaataactctccattccttctcctcccagcccctggcaacaaccttggtacctcacatagtgaaatcatacagtctttgtctttttgtgtctggcttatttcacttagcataatgtttacaaagttcatccttgtagtatgtgtcagaatttccttcctttgtaaggctgaatcatattccgttgtatgtatgtattttgttgatccattcatttgtggccggacacttgggttgctttcaccttttggctgttgtgaataaggttgctatgaacatgggtgtacaaatatcaatttgagaccctgctttctattattttggatatatacccacaagtggtattgctacatcatatggtaattctatttctaattttttgaggccttacattatccggggttttttttgtttgtttgtttgtttgttgttttttttgttttgttttttgagacagagtctggctctgttgaccaggctggagtgcagtggcacgatctcagctcactgcaagctccgcctcccaggttcacaccattctcctgcctcagcctcctgagtagctgggactacaggcgcctgccaccacgcctggctaatttttttgcatttttagtagagacggggtatcaccatgttagccaggatggtctcggtctcctgacctcgtgatctgcctgcctcggcctcccaaagtgctgggattacaggcatgagccactgcacctggccacattatccgtttttatagtggctgtaccattttacattcccaccagcaaagcacaagggttccaatttctccactttttatgtcctttctttctttttttttttttggtttgtttgtttctgtttcttggctttctgtttttgtgtttgtttttttggtaatagtcatcctaatgggtgtgaggtgaaaagaagacacagtattagtcatttatacaagtaattgatttattgatctaattatattgagggactgaaacaaaaattgtgggcatggggtctggcaatttgtggggttttaaaaaaattattattttttattttttagagataaattcttactctgtcacccaggctagagtgcagagttgcaaccttggctcactacagcctcaacttcttgggctcaagccatcctctcacctcagcctcctgagttgctgggaccacaggcaagcgccaccatgcccagctaacttttgtattttctgtagagacaggggtctcactatatcgtccatgctgttcttgaactcttgagcttaagcagtcctcccaccttggcctcccaaagtgctgagattgcaggcatgagccaccgtgccctgccctgtctgtgtcttcacaagccctctaggtgactctgatgggcactcaagttggtgcagagggatgcaagcggatgaagctggcagtgcgtgagggtggtctctggaagcctagaatcaggttcaggactttgggctaggtttagaaccctccagtgactgttaatcacacctggaataagacagattctcaccatggcccttgaggccatgtgacaacctgtgtgtccctgctccctgtgcctccctgcattcttcccctcacatgctccactccagccgctgaacgccagtggctgccaagctccctcttacctttctcctccaacttggcatgttcttcctctctctcctatggcttcttcctcctgattcaggtcgcagctcaggtggcgcttcattagcaatatcccttccctgaccaccccccatcattctctcatacttccttattttctttctctttgtagtacttttttgctgcctgaaattatcctgcatttatttccttacatgtgtgctgtctgcctcctcagctagagcataaggtcctcgagtctggttctctgtcctgtccgtcagtctatttccaatgcttggaaccaagcctggcacctagtaggtagccagtatgacttttttttttttttttttgagacggagtctcgctctgtcgcccaggctggaatgcagtggctcagtctcggctcactgcaagctccgcctcccgggttcacgccattctcctgcctcagcctcctgagtagctgggactacaggcgcccaccaccatacctgactaattttttgtatttttagtagagacggggtttcaccgtgttagccaggatggtctcgatctcctgaccttgtgatctgcctgccttggcctcccaaagtgctgggattacaggcatgagccaccgcgcctggccgccagtatgacttttttattcagcagacattgggatgctctgaggttgttctgaatagtgaagcagccccgtcaaagggtgccttctgtggagattcctcccgtggctatgtgtagggggtgctgaagcaggagggctctgaaatgagggaaactagggacaccaagagttgagttgtgacatgaaaagggtccacgccggtggttctaagctgggggcaatttctccccctctccctcctccagtggacttttggcagtatctggaggcattcttagttgtcacaactggggagggtgctactggcatctactgcatcctcacaaggcaggagggcaagtttctgccttccgaagagtgcatgaggcctctttataagggccttaatcacactcacgagggaggagccctggtgacctaactacctcttaaaatccccactgcttactaccttcacattggggacccctgaaatttgaaaagagacacattcaaaccgtcgccctagcgatgctgctgaactccctacaatgcagacagcagcccccccacagagaattacccagccccacgtcagtagtgctgaatatttccaagtcggcagaataggattgttcccctctctgtgcctacggttaggactttaaatctctttggccacagagtgggaagaccacgagaacaggagttcctctgagaatgtgcgtgcatcaaactctgcttctgtctttctctattttctgcttggcgctgcctcctgctctgtcttgctaatcctgtatttctgttctccccctttcttcccttcctcctcttctctcctgccttcctctttccttccttctcgccttccctgttcccttccctcttgtctgtttcctcttcttcctttctccctctgctccctctccctttgtcccccatttaacagcccattatgaatatttgaagtttagtaggtttatggtctcggttcttaatttttagagtgggtaattgcgtgggctccactaaatgaaatttactagctctttccttccatggcatatggcatcggaataggactgctttttatcccctgtggtaagtgatatttctttcccctcgtccctctatgcattttgaatattctgacaacagtcaactaagcatctctttcaggcaacagctcttgaggaaattcatgcagacagcatgagtttatccagaaaagaataccaaagcaggttagtttcaaggaaacaggcgggttagtgtccaggaaaaaaacgatgcataatatgggtttttgagggaggacagacctgagaggtgtttgttttgcgaagtgctttaaagtatgtttgagacttcggcagacgactaaggaggcagtgtgttacggaggtcccagcctcagggaggctgaggggacagggagcgaggcagggttcacacccacatcctagatgtggcctccaccaggaggtactccccagcatgtagaacagtgacttgatattaatacatatctcttccctttcacctttggaaaagggcaacagacaaatgatgagagattatctgaatattatttgaaggaatgatcacaggaatattttgctcttgccccattgtggggccctagcttggactcggaacccccgtgtcctcctggataaatactcccttccctgtactggctccttccctgggggatgatgacaatgaataaaaagacccattacttgtgctttgatctcctgggaaaagagacagataactccaaggtggaaacaatcgaagtaatggccctccagatttttctacccatattcttgcaaagaactcaaagccattctaatctgtcattttctcctgcttgcttttttccttggtgtggtcagacctctggctcccttggtacttgccagttttgatcggaggccacagggtcctgtgttgtagactctagcaggcatgatgctcatttattcacagctttggctaaaatgtagagataagaccctcagtggtcctatggcttagggtcaccctgtctagaatcagggatgtaacatgatggagattgacagatgggtcagaagacagcatggagtgatgtttgcccaggggtgagtggattcttgagatggcaccttccagctgccccgctgagcttgagtttcagagtctgccaggcacctagcttgtgatctctaccctccctcccctgccccaccaccatctccccagttcatccatgagtctttgagagcaggggacagaactacttcatgtcttcatgtcttgtgttctcaacggcatctaccccactggtgcctggcgtgaggtcggcgctcagtaaatgcaagtcaaattgaattatcccggacaatgaagctgatctgggctaggtctcccctggaggtaacaggcagaccttgcctggcatctttgtctgcactagacctatgaaggctcccagcagcccccatcactcccgtcccttctgccttcattcccactctgtcccataagtcgtccagaaggctgtcaccggcgggccattagacaagacaaatgggcaactccagcccactgttcctttcctccagcctggctgtttgtgcagtgagccatgagactggatatcccgggcactgaactgccacagtcgtgcatctgggctggccagtgctggctggctgagcttgcccagatgtagctgggggctctccatgactgctttcaaaagagaacacatggggactatcttcctacccaaaagaaaacctacagggaggtgagccggtccacagagagcaaggaactgtttaaggaggctaactgggaatatcaatcaggtatccagagaccttacaaagtggccgtatacatagggcactaactgcagatagaattgtcggtgatgccagggactttactcatacattttgttccaggggtcatgttctttagctaattgtgggagtgtgaaagatgaagggatagaccaaaaggtgaaccttgtgaaagtccgagagttagctcatatcagggtcaagtgcttaacgtgcctaacatttgcctggctctgtgctgagttgtatgggggttacaggatgagaggagactcagctcctgcacttggggtgtttccggtttacacagcagtcccgtgacacagggaaatggttctctgcggcgcctgagcagcttgattctgtgcatgcctccgcgtctccatgcgcatcctcctggtggctctgtgctcatccccagctaacctgccctcctggcccttttggcacacacagagcccccactcagcggggttgccaagcccatcacacttcacctgccctgtcagagtgcttccttccaacccatctccagagcaactgcttactcaagagtggcagctgcatttcccttgctccccagtgcaaccttcaaacatttcccccattctttcccgatccaagtcctcccctgccttgtgcctgccgttctcatgtagggctcctagccttcctctcactgctgccttgctctggccccatcatcatcagtgtccacggggccatcccgctggtgccatggccttggggatcctcagccgcctcccttccggtggccttctctcccactccatgtcaccatcacagctgcattcttgagtcatggcagcccttgatcctctgcttctaaaaccatacatgtccaaatcccatggtctgaaaacagcatcttacccaatctcaccatcgcattcccctgctccgctcttctgcgtatcctggtatccacatattccacaaatatgcagcctttcctttctgctggggctaacccattggacagctttttctgggtgttactccctttcctgtccagtggaaaaggcccagtccatcaccctcgccaggtcccaatagcaccttcactcatttgtccccagtcctgcccacccacctgatcacctcctactcttagttgtgacatctgcctgccttgcttctggctgtgccctgaggctgctttcagaaacacaccaacatctcttcatttcaactgggtccaaacagaaatgcatgtacatatcagagcagctattccaagccctcccctgaagccaccttccttatctttgtcagtcttgctagtgaaagatgaagatgagacctttcctcttttccgagaaaatagatgccatccagctcagcctctctcaacaccccccacctacagcaaatatttatttacagctgtatctgtcagcatcggttagacctgcattacgcagtgctatagccattagtattgagcccctggaacgtggctcatctgggtggagatgtgctttaaatataaaatgcacactggattttgaagttctggtatgaaaacaagaatacgaaatacacaaatgatttttatattgactagagattaaaatcatagtatttgactgggtacaatggctcacgcctgtcatcccagcactttgggaggccgaggcgggaggattgcttgaggccaggagttcaaaaccagcgtaggcaacatagtaggactctttttttttttaacaacaacaaaaaaaatacgaaaattagccagtcatggtggtgctcacatgtggtcccagctattcagggctgagacaggaagatcgcttgagcccgggaagccaaggctgcggtgagccaagatcgcaccactgcactccagcctggacagcagagtgagaccctgtctcaaaaaaacaaaaacagaaacaaaacatagtgtttgtgaaatttggttaaggaaaatattgaaattaattttttaatttcacctatttcttttgatgttattttattttattttattttattttatttattttattttattttattttattttttgagacagagtctggctgtgtcacccaggctggagtgcagtggcacgatctcggctcgctgcaacctctgcctcctgggttcaagtgattctcctgcctcagcctcccaggtagctgggattacaagcactccaccacgcccagctaatttttgtatttttagtggagatggggtttcactatgttggccaggctggtttggaactcctggcctcacgtgatccacctgccttggcctcccaaagtgctgggattacaggtgtgagccaccgcacctggcctctttggatgtttttaaatgtggctactggaaaatttaaaatgacatatgtgccttgcattatatttcttctcttttttcttttcttttctttttttttttttttttttttttttttttgagatggagtctcactctgttgccaggctggagtgcagtggcatgatctcggctcacagcagcaacctccgcctcccaggttcaagctattctcctgcgtcagcctccctagtagctgagactgcaggcgcacaccaccacgcccagctaattttttttttgtatttttagtagagatggggtttcaccatgttggccaggatggtctcaatctcctgacctcatgatctgcccacctcggcctcccaaagtgctgggattacaggtgtgagccaccacatccagctgccttgcattatatttctatggctcagctctgagtgggaatataggctgagccacaaaaacaaagggacctgaaaatgtagtagctccaagatcaaagtgtttttctctcacacataaacctggaggtaaatagtagtggtccaaggatagagggtggcgggcggcattgccgtcagcagcacgtgatctctatatgttcttgtatgtgtcattaccaccagccaaaaaggccaggaacatccagggcaaggagatgaactggatggtctggtcactttacttccatttgctagtgcaggtttagcccatggcctcctgagttcagggaggctggtaagtgtggtctgagctaggtggccatgcgtctgtgtcaaacatagggtgtcatatgagtaaaaggaaaaaaaggagaaggcacccaagaagggggagccgtcccttctctcaccccagatgagcctgcacctgtgcaccaggctccctccatctgcctttttgcagggcttgcttcagaaagcgctcctttctgctgactttctctttcccttcccactggctcctcttctgagcccttcttatcttaatttaaacacccttccttggagggtgtgcttccccccaccgattgtcctaattatgccccctcccttcccagaccggctgcttggctctctccattcacttctcggccgctcctccacctgctgccatctaaatgctgcctaacctctcccctggaagggctcttgctgaagtccccggtgacctcctacttgcccagccctgtggagaatgctcagtccttgttttatctgacttctgttctccttagatcctctggtctaaccattgcttctcagtctttttccctacactgtcccaaatgttgagtcctcagagttttagcctggttcttcctctcctgttactcaccatcctatgccagatccaagttgtcattatcaccctgaccctggggactcccgggtctccgtgtctccagcctggatcattatctggagagccagaccagtaactttttctgttgctaaacagtgcgccccgaacttaataaatactacaccaaaatcattatctttgcccttctccaaaaacaaaaaaagaacaatcttcctctctatccccctgtattctttatcttggtcactgatgtcactatctaaattgtcagtgaagccaagagccctcttacctcatcccaacccccactgattttgattctgcccggtttatctcactagaatctgcctcttctctttgatcctctttccgtgcccctcactacctgtctcatttctctttcctggactattaaaataaccctcaagctgatcttcccaactcgtatttctgttctcactccagtgtatctatgggagtgatcgccctaaaatgcaaatcttatgacgtcatcgcctgtcggaagccctcctcttgtccctcggcaccttctggaccttcaggcctccatcccagttcaccagtgagacacacaggttcttcatgctcttttcctcccatctgccttccctgccaggtgctcaggcccctcccgctgactgagccagtcaccacacactggaacacactttgcttccttgcttccctgggaagctcactcccctccttcaaggctgactcttgtgtgaagcctggcaggtagtagtaacttaacacatgggtgttagataaatgcatgaggccttccctaaaacttgccccaccacctggagtttggtttccctttatctgtgcttccttagaattttgtgattctctctatggaaccacttcattgtacagtaaagtctggctctgtcctctgaccccaggatgccttccagagtcaaatgacctcatcttagtcacctgtgatttcccagcacatgaacagctggttcatggtgggagcatcgtaagattttgtcatatcacttaccgtatcaggttgtggctatttgcttgtatgaccatgtccttctctggacactttgaaagcagagatacatcttatccttctctgcatacatagtgccttgcttaagataggtgtttaataggtatttggtgaattaataaagaaaggaatgattgaatgagtgaatgccttacccatgtcaattagaaagcaaacgattaagtactaaatgaatggtgcacacaataagtgctttggaggatttgaggagggtgaaagtgtggggtggagcagttcagtgcttacctggggcacggtgggaatggggtatgagaatgagggttattaggtaggatttggacatgggttttaaaaaacagctgagtacgttccaggaagagaccacctgaacaaaaaaacagggcaaagcagcatgctgtattcagtgttcagcaaggacaatctagatgtagctaagtggtcatagaattcagtagaaggtgagtctgcaaagacatgttggggccagactgtggagggcctgagggccaggcaggtgcatctgcagtggagagtagctaggttggtgcaagagagactggaggcagaagacagggtagacatattgcaaaagaaagcaaggagtggcggcagtgggaacagaaggggggcagtgggtgggaggcagatccctcagcagtctttagtgggtgagcagatggaggggctgtagggatagggagaatgcaaggcagctctgccagggatttgcatgagaccaactggtgctatgaagtgaaactgggaagccagaaagagcccccaattcaataaaaagataatgggttacatttgggacacagaatttggacatttggacatttcttactagtagccagaaaaaggagtctgatgtgtagatgagaaattgggggtggagataggggttttggagttatctgcatagggctgatagtcaaaaattaatgtttcttaagggagaaattgcacaatgaagagtggcttgtggactaaatccagggtgtaaaattgggggacacttacatagtgtctagcattacatggaagaggaaggggagcgagggaagaggttggggcatatgagagttctggttcttccatatccatgtcagcaattggtatggtcaagctttttaattttagccattctaatagatgtgtagtaatatatcattatggttttaatttgcatttccccagtgactaataatgttggacatattttcacgtgcttacttgccacctgtacaacttctttggtgaaatgtctattcgaatcttttgcccactttaaaaattagattgttggttttcctattactgagctttgaaagttctttacatattctggatacaagtcctttatccagcatgtgctttgcatgtaatattttctccccacctatggcttgtctttcattccaatcttttgaagagcatacattctaagttttgatgacgtctactttaccaattgtttaattttatgggttgtgcttttgatgtcatatctaagaaatctttgcctaactcaaagattttcttctagtagttttatagttttaggttttaccgttatgtctatggtccattttttttgttaatttttgcatatggcatgagtaaggattgggatttctttaacatatggatatccaaatgttccagcacagtttgtgtaaagactttttttccccactgtacctttgttaaaatcagttttccacaaatgcacgggtcaaagtagtaattatgaaggaaggaatagaagttggcatagaatccctcaaaagccaagacaagtttggctcaaagattcttgaagttctcctgctgtcaggcgaggtcattgcattggggatgggaagaattaaacctcgaaagttgaagactagatgaatgatgggcgtacattataggatgcatgggtttctgtgaaaacacattgtggtgcacttgctcagcctctgcgttcagggaaggcttcctgaaggaggggatgtctgagccgagatagtcagtgagcaaagatgagagtgcagaaggaggagagtgagcaaaggtgtgcaggcatgcagcagcaccgtgtgtgtgtgtgtgtgcgtgtgtgtgtgtgtaaggggtgctatgagtagttcactgcttctagaaggtagagagggatgagcagggaagcacaatataaggtttgacagagtcaagtcagatcttgtgtgccgtgctgaggaattccatttattttgaggatggaagcttttaaagcagggctttacacttcaaagcgcacactctggcagctaggagagggtgtggttgaggagcgccaggtggtggtggttgtgccagcctggaggcaggaaaaccagataagagttaagaggttgcagttaagtcgttgagatgaaaggaccgaagtagggtggtggtgttaagactggaaagaagtggactggtttgagaaattttgaggaagtacaaccaaaagcaattggagactggttattggaaggtgcggaattgggtgaaggcacgatgcctgggtagctggtgctgctattaactaaacgtaggaatgttaacaggaagaatctaggagggaagaggtgggtttactttgggtcttcctaaatttgagatgctctgcagatacgttcatggagatgtcaccaggctgttggatataagtaaagcacacccatggaggcggctatgaaatagatcaatcaggaagctcctgggaggatgacaagaagaggcctctgcaaagaccttggatgcaccgttgtttaaaggggaggcagaagaacatacctggagggaacagttagagcagtgtgaggagaaccctaggagagtagtttcatggaagccaaggaggttgattaaatgagataacatatatgctcttcttaggacagcacctggcaggttgtaagtcgtattgccagctagtgatatagttagacaaagaatcaaaagttcaccagttttgcaaaaatgaatattgatgttgacttggcaggtgcagtttgggtggagtggtggggacggaaggcagagtgcagtgggtcgaggagaacatggcatggggtgaagtcagcaaatgttgagtagtcatttgagaagcctggcttgcattgaaagtgacagagaagggagagccagagggcacagctggtcagggtggtcaggggagggtctgcataggaggggcgggccttgactgttagcacaggggagccagcaggcctcgggagaggctgaagaagaaggaggcctggtgaggcagagtcccaggggaaaggaaggaaggctgtgggttgtctggagccctcgttacctgagcttgttgggaaggtatggggcacaaagtcaaccagctcactgagagtggcctcagtttaaccagtgtgtgagctgagagccaggggctgagagcagggtgatggttggaggtgaagggtggtgttaggggtcggagcccagcaatggttacaggtgaaaggtgatgttaggggctgagagtagggtgacggtttgaggtgaaggcagtggttacaggtgaagggtggtgttaggggctgagagcaggtagatggtttgaggggaagggtagtgttaggggctgagagctgggcaatgtttagaggtgaggggaggtgttggggctgagagctgggtggtggttagaggggaagggcagtgttagggctgagagccaggtgatggttggaggagaagagcggtattaggggcagagagccaggcggtgtttaggggctgagagcaggtagatggtttgaggggaagggtggtgttagggctgagagccgggtgatggttagaggtgagaggagttgttagggctgagagccaggcaatggttagaggtgaggggcagtgttagggctgagagcaaggcagtggttagaggtgaggggcgggtgttagggctgagagccgggtgatggttacaggtgagggaagttgttagggctgagagccgggtgatggttacaggtgagggaagttgttagggctgagagccgggtgatggttacaggtgagggaagttgttagggttgagagccaggcgatggttagcggtgaggggaggtgttagggctgagagccaggcgatggttggaggggaagggtggtgttaggggctgagagtcgggtgatggttttgagggtaagggtggtgttaggaatttagagtcaggtgatggttagaggtaaacggcggttttaggggctacgttgtctcctctccagaatttctatattgaagccccaccccctaagacatcagaatgtgactctatttggtgttgaggtaagaaagttaaaacgaggttgttaggtttgtcccgaatccagttggacttctgtctacatgaagaggagctcagcacacaggcatgcacagagggaagaaagaccacgtacgggtgcagggagaaggtgccatccgcacaccaaggagagaggtcttggaggaaaccagtcctgcccacaccttgatcttagacttccagcctccagaattgtgagaaaaggaattttggttgtttaagcctttcagtctgtggtgctttgtaatggcagccccagctgatgctaagggtctgtggtgtgggaggagctggctgagcaagctccaaggctggtagcggcccagcctggtgccccaggtggggacgaaggcatgagttggcggcgggagcggcctgcacagtggtgtgatttcctccagcaagaggggtgaccaaggacaaggggctgaagagtgggacacagaggacagaggtgccagatgagtgatggggatgggctgtagctgggcctccgagagtgagcagccagggtcagctggggagcagagctaacgcactccccaaggtgcaaactgtcactttttcttgttaacacagggctctatccggctgagccaaacggccacagacagtgttatagatactgcctataaagactctccagtaaaacctctttattttaccccttaaaagggtaagagttaccgaagtgcatggaaatcttcagcagcgaggctctggaagaactgagggattaaggaggctgcttttccaacctgaggggtcacttctgggctgctgagaatgtgtggagggagagccagccccagtccagtttacccagggagcaggaggagagcagccagccccgggggaccctggaggcctctggcgggtcatccaccctgcggatccctgtgtcgtggggctgctgtccgtccactcatcgcctaatgctgactgcaccattgccaggcgccacgtctactactggctgtaggggatgaaaagacaagcggccttgaattattgattcactcaacaaccattcattaagggcctactgtgtgtccagaattgtgcagctacagagatgaatcaggtgtggtcctcaccccaaaggagctgaaaagatagacaaatcagcataatgaaaaagtggcttgtgtctaatgaagggtacagaggaatttctgtgggagttcaaaggaagggaaaattaatttgggatggggagtttgggaagattcaaaggaaagagggattactctgggtttttttaagtacagccatctctcagtatccactggggattggttccaggacctccctcggatactaaaatcggggacactcgagtcccttgtgtaaaatgcgtagtatttgcatataacttatgcacatcctcccatatgctttaaatcatctctagattacttctttacctaatacagtataagtgttatgcaaatagttgctatactgtatttttgttggtgttatttttattattgtattgttattttttgttttttttttcctgaattttttttttttttccaagacggggtctcgctctgttgccaaggccggagtgcagtggcgcaatctcagctcactgcaggctctgcctcccaggttcacgccattctcctgcttcagcctcccgagtagctgggactacatgtgcccgccacaacgcctggcatattttttgtatttttagtagagacggggtttcaccatgttagccaagatggtctcgctctcctgacctcgtgatccgcccgcctcagcctcccaaagtgctgggattacaggcgtgagccatcgtgcctggccttttcctgaatattttcaatccacggttgcttgaatctgcagatgcagaacccacagatatggagggtggattatacaagcagttgagggaactcacaggtacagatagaaggataaatacccctccaaggcagtgtgcaaggaatagtctgtttgagtggtgggagtttctcgggaaatccaaggagaaagagagcactgtggctagggggtcagagagggcttcctggaagaggcgcctgagggagagaagagccctggtagggaaagggagaacaagggacagggacagcattggcaaaggcatggaggagagttaatgggccagtccaggactgtacatggaggctctgtcaccttgttgggggtggaggggatgctatgaccgtggaagccagacaggacagaaggggcctgaggccatgccagagactcaacagggacagctcttcagagagtggggaggttctgaggaccttgagcgggtcagtggctgtatgccctctcggggtcgccacggccacactgattggggtgagctggaaggcgctgcaggggggaggagtcccctctagcattgacacaagcatgggacaagaatatggagaggagtttggggggcggagaagggcacaatcaaggggctccccttttcttggcatgagccatagaactcagaactgggcacagggtgaagttcttggggctcatggggagaaaggctcaatggaaatgcaagggatcccggcttcctgggcatgccggaggcatcttgaatccacctgggttggaagagtcagtgtgcactgaggccccatggatggaaagagcgggaagccccgggtctctgaacgcatctccccatctcagccctgcctttgctgtggccccagacctcccagcctcactgtggctcggggcttctctgcagggcagtccccagggctggaggatgtgccgtatcatattattcctcattaggcagcagctggggactcggagcgtcccagcccagccaggcagccaggcctgggggacgcagtgcaggctatgagcgttcactgcacattaagtcttgagcaagctgctctccttcattcatctggtctccactcctgggactactgaagaagcatgctgtttggtaactgcctgttgagcacatgcttctctggtgtcccaagagtgcctgagcctccaccttgtctttgatgtccacagctctagagtctgggtacctgttgtcgtcctagttattctgatcctcatatgttttatgccagccaaccactggttgaggccgtttccagccagataggaatcactgtcgaaaacctaattaaaagtggtccctgaatcgcacgggggttgggaggtagagaggacaggattttagatgttagtgagttggcaatgacctgcctaataactttgagcacaaagttctgcattagatgctgtgggcagggaaagaggaatggggtgaagagaggacctcatcctccccttaatacaagattcgcacgttccctatttcccacgtactcattttccctctgtctcaaggtgtgtgcagtgatgctctgtgagctgactgtatgctgttacatggcagactggtgtccaggctgccatagcaaaataccacagactgggtggcttacccagcagaaatgtttcacagtgttctggaggctaggagtccaagatcatggtgtcaggcaattcgcttcctgttaaggaccctttccctggtttgcagatagccatcttgttctatcctcacgtggcggagagaaaaagagagtgagctctgctgtctctttttttttttttttttttttttttggagatggagtcttgccctgttgtcgcctaggctggagtgcagtggcacaatctcggctcactgcaacctctgccttctggttttcctgccttagtctcccgagtagctgggattacaggtgcccgacaccacacctggctattttttgtatttttagtagagatggggtttcaccaccttagccaggatggtctcaaactcctgacctcacgcaggtaatccacctgcctcagactcccaaagtgctggattacaggtgtgagccactatgccaggttttgtttttgtttttgttgtgttttgttttgtttttgagacaatctcactctgtcgaccaggctggaatgcggtggcatgatcctgttggctcactgcaacctccgcctcctgggttcaagcggttctcgtgcctcatcctccccagtagctgggattacacgcacacaccaccattcctgggtaatttttttgtatttttagtagagacaggatttcaccatgttggccaggctggtgttgaactcctgacatcaagtgatccgcccgcctcggcctcccaaagttctgggattacaggcgtgaggcactggtgtctcttcttataaggacactgatcctatcagatcaaggtcccatcctaatgaccttatttaaccttagttttgtcctacagaccctattttttaaggcagtaatattgggggttagaacttcagtatatgaatttggtgggacctgctgaagtccacagcacactcttgaatgtttactttgccaaaacaaaatggggataggtgggactgctggctccggagcagaccctttggtgtgtgctgcctcctgtggtgcaggcgtaattgtggcctttgaacactgatgaggcagaggcaggcccagcgtgactctgaaacatgaacaactacatcaaaacattcccagtccccaggcccacaggggacatgctcattttctgagagattattttactactttatttatcttactacaagtgattgttaaatagttagtaggttatagatggaaacattggtaacagtgagctcatttggcccaaagggaaggatagctgcctccatggtctgaacaccatctcaatggggtggagggaggacagggagaagggaggagggggagttacctgagagagttttcagaggtccaggggcaagcctgttgctattggtgttttagggttcatttacagtctgtagatggaggcttcctttacagtccctggaagcctcatgcacgctccctagcgcaccccctgcttcgcagcaaatccttgagtttttataagaaggaagacaagcttggtcagggtgcaaggtctggagtcaggctgacctgggctcacttccctcctctgtcatgcttcaaacctgtgagaacgggcagatcatgacctctctgacctccaattcctcgtgtccaagtgaagataaaatatccacctcatggacttgttgcagagattaagtgagatagagtccactaagtggttatgctgacattgtagcttaatgtaaagcttgtgtgtcatggatccagtgtctgtccaactcatgctggatggcactgccagttcctgatactttagatgtctcttttccttgttgtacagcttggctaattttttcctattttatatatttattttgtgacagagttttgctcttgttgcccaggctggagtgcaatggcatgacctcggctcactgcaacctccacctcccgggttcaagcaattctcctgcctcagcaccccgagtagctgggattacaaatgcctgccaccatgcctggcttttttttttttttgtatttttagtagagacgaggtttctccatattggtcaggttggtctcaaactcacgacctcgggtgattcatctgcctcagcctcccaaagtgctgggattacaggtgtgagtcaccgtgcctggcccctattatatttttaatagcaaaacattttttcccacatcaactcttaggtggaaccccaacccctgaaatggatgcaggtggaattgtgatggtgggagctggtatggggctggagaccccaggcagcctcccctccacttcttggaggagcccaggggcctgccagggaggaccatttgagaagcattcctctaggctgccctgcttcctttctagttgcaaggtcgtcattctcttatgccacagcatgactgtctcggtttctgctttctcagtagccatctcattctggtcgtgcttcccgcaggtgggggtgtgggggtgattgaaatgttcccaggctcttcagtcacatttatggtgctctggtcacttctgcgggtggctaatcaccccaggtatgcgtggactttgctagttaattcccagaagtccacttgattgcctcggacttgggatgtacctctgtcgccccatgcatggccaacctgagtaaatgacatttaacttttattattcaatgaagttatgcatgtaaataaatccacaaatcaaggaagaaatgctttgcaatattctgtgtcctgattttgggtttgtgggatggattacagtgagtgtggagcaatgcacagaaaagacagcatagaacctggatctctgcgtccgcgcagacattcaagggccacgtgtcagtgaaatgtattcggcttgattccctgtgttgcttttctgaattctcaacctctgaaagataaatatttcttttaatgtaatggctttcttgagatataacttgcataccacgtaattcactttaagtatataattcagtggtttctttttgtatattcacagagtagcacaactattatcacaattttaggaacatttcatcacccccaaaaagaacaccacacgcattagcagacactcctcatttctcccaaccctaggcaaccacaaatctttctgcctctgtggattcagctattctggacatttcatatgcatggaactgtccaatatgtatttttttgtgtatgtctggctttattttacttagcctaatggtgtgtttgttttttcagatggagtctcgctctgtcacccaggctggagtgcaatgacactgtctcagctcactgcaacctccacttcccgggttcaagtgattctcctacctcagcctcccgagtagctgggattacagacgtcatgccaccacacctggctaatttttgtgtttttattagagacagggtttcaccatattggccaggctggtctcgaactcctgacctcaagtgatctgcccgcctcagccttccaaagtgttgggattacaggcatgagccatgcgtccagccacacttagcataatgtttttaggttcattcctattgtagcatgtatcagtacctgttattttttattgttgagtaatattccattgtatgggtaaaccacatttttttatctatcaatcaatctatggacatttgggtttctttttggaaattatgaataatgctgctatatatatttgtgtacaagtttttgtgtgatcttcatttttgtaacatctccatcaagagaattaagaatctctatagctagatttattgagtgcctcctgtgtgcaagatcctgtgttgatcccatgccatatcttgtaatcttcacaatagcccaaggctctctccacttccttaaaagcgaggcaactgaggtcccagagctgtggagggctgcagctgggactggaagccagttgtctgtgataccataacatttatccttaacactgctcccagaagttgggcaactgttggtattacaccactgcagttgtccacactgaataagtcacactgattaaatctgtgtgctgtgccacttccacacattatcttagtgaatcctcacaccaaccctgtgaggttgtcctactctttctaatgttcagtgaggaaaagaggttcagagaaactaagtagctcactttggtggcatggcccatcggtgtcagagcctggggagccagcattcagcagtgtctggcagctgctccttgaggccacagccttccctcacagacctggcatcctttaaccctctctcacctcagggagagtttctcatatgttcagaatactatttcaaaggacagccactacccgcctcactttgcacaatgcctgcttgcctgtgtgcatggagacaggtatccaagtatcaggatgcctggacccggggacttcgtgcagacaggacccctagtggcctgctctggtattacaggattcccgaggcgtgcatccacattagaattcacttctacacctggctgcaaaccaagacccttaagcttggagagaacttgttctgggggacggttctgagcatggcaggatggagaggaacttggggtgctgcctggaagaggaaggtggcagcagggggaggctggagaaggaggagggtaacagtagcggtggagtaccaattgtctccatgtggttgcctgcccacagctgctatcttggacgaccccatggagtgcagcagaggggagcggctctccatcaccctggccaagaaccgcatcaaccgcgctcctgagaggctgggcaaggccaaggtcgaagtggacatctttgagcttctcagagacagcgagtacgagactgcagaaaccagtacgtagactgggcagggctgcctcttcccttgctggcagaggatggatgagcagtggtgtgagctgcacctatcagtcaccaggcctctgagatatctgatgtcgatatttccagaggaaggagaggaacttgaaccaggaggtcctgtgaagctctcagcctggatgagattcccaggttttgtgcgaatcacgtgtggagtagaattaagacaggatacccattcattcattcatccactcattcattgcttcatatattgattcattcatgttctggacattttgtccacaagttcctgaatgaaatctcgtgtgtgataagagagacggccagcccaagggtatcttagccactacacatctgactgcttaccttgcttccttatgctaagggcgctgttgtgggagaaactgggacttgggatggaatttgaccactcactctctgggtaacctcagataagtcactaagtcatcctatcctatccaaacctcagtttctacatctttaaaataggaatactaggctctattttgcaaatcttgcaggttgttaggttgttgtgaggtgtttttttgtttttgttttttttgagacagggtcttgctctgttgcccaggctggagtgcagttgcacaatctcagctcactgcaacctctgcctcccgcgttcaagtgattctcatgcctcagcctccccagtagctgagattacaggggtgtgccaccatgcccggctaatttttgtatttttaggagagatggggtttcgccatgttggccaggttggtcttgaactcctgaccccaagtgatctgcctacctcagcctcccaaagtgctgggattacaggcatgagccactgcgcccagcctattgtgagatttaaattattttaaatacaggaaaatctgtgaattgcagtgttttacaggcatatgtagtaggtcgctcaagtcacacatatggagcccctactatgcgctgggtactgcttttaattctcacctaagtgttaagtgttatcacctccactttagaaaagaaactgaggctcaaagccattgaatcatttgccagaccacagagctagtcaatggctgagctggttctggaccctgtgtgcccagtgcagtccatgagacctccctacagtcctccggcctgttgtttgtattaccttgacaactttacaagactaggcccaagttagtgggctggtgacttgtggctaagctggaaatggatcagctccagttcagagggcaggagaagagcccctcaaatcagagataatagtatctattccctaagactttgaagagtccccgtctcctccctttctaacccgtttcaacctttgaccacactcagtggcaaaaataagtaaacaaaacaaaagaacaacttgctcaaatacatctgttcttccatctgaggatccagcaaagctccagcctgggctgttagggtttcaagaaaatcagtacatccacacaggcccaagcatcacatgtggggtgtcgtgacatccagaaaagttaagaagcgatgcaggcagtggctctggagactccccagcctttctccctctcacagcttccttcttgctcctgtggtgttggatccaggctcttccctctctcttagtttgggttccctggtttattcatcatgtacttgtccataatgactacccagacctgatttactctctgtttattcattcagaaacttttattgagcattgactctatctcaggcataattcaggatatcgggcattgggaacaaagcaggaaataagatagatgtgctcctgacctcaggtggctttcagtctgtctttaggctgcacatcaggggcagcttcccccagtgcctcttaatgtgcatccccaaggtctggctctgattggatcagctcaacttgcagtgtggccagtctcacaagctgcaggtgttggccaggctgcctaataactactcttggagagagggtctactcccagtccctcctgctcctatgactgagggagggccataccatatagaacagggccattgaggccaacaggatctgtaggcacagattcctccccaagaaggcatggaggaacaagggccaaaatagtccctcatttattcattcggtcagtaagtgtttagtgagtgcctattatattttattctaggccatggggattcagcagggcacagacaagaatcctagttgtcatagaggttaatttctagtataatggaaggaagattcagatttcccagtatcttgcaaatgaaatcagaaatgccagcaacaactccttgtgaacccccagtccagtccacagtgtttccttgtccagggaggcaagtctcagacaagggtccagatttctaaatagttcagtagtccatactttgaaaagccagcccttctcttctcggttcttcagggcttctctggcagaaatgagggagccaagatttgcccgtcatggatggcatcgttagcagatgtaaatttcctcttttagtgacccatgcagcctgacttagtaaagtcaatatttctaaaatattgagccagatgaatcaggggaataaaggaaacaggtatctttattccatcttatagaactttgggcatctttttaatgggcttcttttaggcaccaggtattttcttagcaagtgggcctcagttcagtttttacatctcagtgtgtttgaggtacgattagcatttgttaggaaaggggacttctggatcttcccactccaaaggcttttcacctgaagccagagtgcccctccacagtgggttttaaacactacccaggtaaagttcattgaaagattccagcccagttctttccctcccaaagtaagggggcaggtgggttgtggcttaagcgcctaccacctgttggctattgcagggtggggcagtgactatatttggggaaggaagggaggagggggacaggatctctgggtggaggagagcccacagctctgtgatccctactttggcgaggctgtgtggtataaaaattcagagcatgggttttagaaccagactgaccagcattaaatcctgggtctcccatgtattagctgtgtgacgtagacaggctgtttaaccattttgtgcctctgtttcctcgtttgtaaaatgggagtgatggtagcattgcctcatagggtcactgggaacggtgtaggtgaaacgctcggcactgcacatagcaggacttcaggaagtggcagctgtggcttttgttgttggcttcattctctcaccccacatttgaacgggcttcctcccaacttattaccagcctcccccctctctcttgtttcaaggttcagccctacttatgtggcagcactgtctccagggctgttctcgagtggcctgcctaatgtcagcatccatcgtaattggatattccccttctccttccagttttctgggcttgatgcatctgatagctctgagccttttaaagttgtggtgagccacctcaagccagctgctgcccaatgccaaaggccgtggtttgccctgggctagtggcccagggctaatttgcatcattaatttaaaaaaatgtgagtggctctggggccctggacaactgccctaaccctacacctgtcaccctgtggccagggactctgcttcagggggatgaaagagaccctagtgatgatatctttgactgtggaaagcagaggctctgattgaagctggggctgtagcactccaacagggcacagttgtgccttactttgagtaacagggatttcagaaagctctgtccacatcacacttaatgaatcctattcagggtgggagagtcagttgagggaagcaatggttatttcaagaatcaaagattatgaagtgtaaagaagctaacgatgctggaagccagaggtcagccccctcgtctgatggttgaaggcgaggctctgagatggaaagtatcacacggggcattaattaatagccagcctggaaactggaaagatatgaggagaaatcaccccctgttctcttgggttcaaatagacagattttcatataatgggtttatttaaagtgagggtcacttgtaaagctttctccagcctgcatctgacatcccccacctctgcccttccaccattatcgccccaggatcttggtgtttgactttccaactccttctacacagcctacagatctaaaataacagagatggacaagacctattaggtcagctcctgtcccacctggcccttccttctttcccttccgtgtcttacctgaacctgagcctttcttctgcagggagctaccacaagctacctcctctgttcctatagatcagcgtttctcctgcggttaatgaattagagcttaactaagcaccaccctttaccattcaaacaacctgaggctccgtcccagcttgaggtttaatttcctgcagacccagaagcaggggcttccctgtcaacccctcccctgtgcctcagtttgtctctgtgaggccaagcatgctatcagctgtccgcacagtttccccttgaaactagaggcgccctggttatccgggcctcctgtggctccagtgcccggcgcgtagcgttccagctccacatggctgcacctcctgcacaggcttccaagcttctcacaggctccacgagcatgacctctggtgattcagagctgcctctgagaagtgagggctagcatccctccttcagttcaacagagtcagttgaagttggcttaaggaaaaaaaagtaagaagccagaagagaaaggcatacaaatagtgatgagtcattcagcaaacattccttactccccttctcggagctacccgcatcataggcatgatgtgggctcagccatgcattgaattgctgtacttagaaatcatctggtccaaccccttccttttacggatggggaaactgaggttcaagatcttctccaggaagttcagatgtacacatctgcaaaacgacaccatctttaggtggctctccagagaacgtgccaatgagtggcacagacaggggagcaggaggtcagaactaggaggtaggcagagcaggctatggggtcaggtgaggcccctggccagaccttagaatgttgattgatgaagagagagaagaaggcatctaggtagatggcataatagcatgagcaaaggcttaaggcaggaaaaaaaatgggatacattgggatgcagtgacagacagtatggctgaaacagagtgtacataggggcagaggagagatcctggcttcagtgtagagcaagttctggagttcaatgcaccaggattctaatcctggctctaccagcaccctgggcttctctcctatgtctcacagccctcctctgtaaaatgggaataagaagagttctcacttcatgaggttgttgtgaagattaaatgagatggtgcttaaatgttacttagtagtagtagaattcatatagtgactcctccctctcagggttgttgtagagattcaggtggcacatgtgcctggcacttggaaagccccagtaaatggtattgctgcttgcacggtggcttgggaccaggtgaaggctttgcgtgatacgctgttggtgaggagaggcgatggcggtcttgagttcttggacaccagggggcccgtcatggggcgtggcactcatgccctcacacactttcttccttggctcaagagccagcaaggccaatccatttagtcccctgtctactcccagagagttcagaatggaatgcgttcctgacagctttggcacaagagaggagatggttctttggaagtgatgaggcaattgtttgccttgccctaggatggccagggcttcacgtgtactctgtgcagtataaacaggctcagagggagactgcaccctctgctccattcaggctgcagcatcgggaagtgcttccgtgtgaaggactctgagttctcccagccctccccagtgcacatctctgtgagccccgtggggccagggttgtttgccatctgggcccagagagcactgagcagctcctcactgtcaggcaggaggacctggccccctgggtccatccaggaagctgctccttcctggaggggggctacagtcagtggcacttaccattagctcctctaaaccatctgcgacacagcctcaccctcccctccctgaactgctctctgtccggaggagggaccctgtgaagatgcaggaaaggggaaaggagtaagttccacgacgcccctcaccccaccacccctgtccagcctgggcttctaaggggtctccaatccattgccagtgctgacattttgagatgaagaagtccctccatggggccactacaccccatcatggccttttattccagcagctgagccttccaactcctctgctgcctgggaggaagaggtaaacgcatctccctcccttcctgtgcctcctgcaaactgctcagagggccgaggcctgcagaatcagcatgcaggggttccagagctgagaccctttataaatgatttccatctctactgagcagggcacccttcatagggaacgaaagaccagttcccagatcccaggaaatccccaggccatagccactgctaagaccctaattcagttccactggactcatttgggatcatttcagttcagttgagcaaacatttaatgagcaatttctttttgccagggctgaatagacatgacccctgatctcaaggccatttatgatccagtgagggagatggacacattgacacacgtgtatgagaagctcagaatggcaggcgcaggcccacaaaccctcgaggcctgatgtgtgtagaatccagattgagacattgggaaggttgaggggctgggcgtggtggctcatgcctgtaaatcccatcacttcgggaggctgaagtgggaggattgcttgacgccaagagttcaagaccagcctgggcgatgtagtggggccccatctctacaaaaaataaaaaattagccaagaatggtggcatgcacctgtagtcccagctactcaggaggctgaggcaggaggattgcttgagcccaggggttcaagtctgcagtgagctatgattgctccactgcactccagcctgagttacaaagtgagacactgtctcaaaacaaacaaacaaacaaaagaacggttgtgtggtgcatgtaccatatgtaaagttgaatctccagtaaccccatactcaaacaaatgcatgcttatattcaaatactcacacattgtaaatagctttacatctgtctgttgagatcagattttgccaacaactgagtttgatgaaaaacatcaagtttcagagccttttggactttggaattgggaataaggaattgtggccttctataagaatttattttcaggagaaactttcctttcttgggaaccaacatcaccaggctgcttgggacagaagctggccaggaattcagagagcaaggaagctgcgctgtctcctaaaggcggctgactcagagccacagtgtgctgtgaatatagggagggagagatgccttctggcctaggagcaagatctgagctggatgctgaagtatgagtgggagtttgctaggcagaagggcaagagaagcctagaccatggtagtctggagatgctaatgaatcccttctcagataaatgtttttaaatgaataaaaacctttttattaataaaaaaggatagaaaataaataacaaaaatccaataaaatggatagggtgactatggaaaccagctatatggaaatgcagttatattttaatagtggtatactaatatatatgcttcttcattaatgtattaaatagcatcgagcctaattactaccataatcttgaagtaataatgaatataactggtatttgaagatatccttagcactgtagtgtcatatgaaaactgcggtgatttctgtgggaaacaaagtcacaggtgctattaacacactgtagtttgttgcctacattcaaaatggaaagaaatgctacatttcacttaggggttagagaaaagaatgatgtaattccccccacaagtgttcacagacccctgacttctacccacagaccccaggctacaggttaagaacccctgatctagagatagccatttgggaacaggatcaggcaggaaaatatgtacagagtatgttctaggtgagctggcatgcagcgggagatggcacggtgggagaaggggctgcaaagacaggacttaaggagaccagagtcactcgaattttacttgctcatcagaagaatgtttttattatagcattgtattctttataatatgttataaaaaggaatacatgctcattatagaaagtagtgaaatgaaaaaagggaagacaataactcagtgttccagtggccaaggcaatctacaaacatcccagttaattgccatttgctggggatggctgtgcggtgcagtggttaaggggccggtctttggggaaatgggtggagctgttgaatcttgactctgctctttaatttctctctgttgattttgtatctgtaaaatgagaatgacagtaatagtacctatttcctcagtttgttttgggaattaaatatgtcagttcccgtaagagtgcttcgaacgggccatagttaacactcagtacatgtagtctttaataacatcttctcataatcattcctcagtgtataagtactctctgtatttgcttagttgtagccttcatatagatatacatataattttatatcctgcttctgtctcttagtattattaaataaatatttttaatactattataaactgttcataagtattttaaatgcctaaataatattccatttgggcatacagcccacattttatatacttattcccttatgattatacatttagtttatttccagttttgcatggaaggtgttgagtgggcctcagtgtggttcagcaactgtttataggccacgtaactctgagtcaggccttgttctaagtatggaggacacagacataaataagacaggttctctgccttgggggcacactccgatctacgttttaggactataatttgccccaccgtttaaagaatggattggaaatgaagaatcctggagacagagagactcccttagaagggcaggttataaagaggggttgacctggaaccatggcagtagacgtaggaaggaagggctggcagagagtgagaaggtcagatggtcggaacctggcccttgacctgtaaagcaggagaacagcttgagtgagggaaggcaagaaagaggccaggatgactgtggctttgagcttgaggagataagaggagtaaagtagagtgggtaagagcactggctttggtgccatgtcgatccccaagttcaagcccagtttgaccttatattacctgtgtgatcttaaacaagttacttaaactttctaggcctcagcttccccagctgtaaagtggagataaaaatgaattttcctcatagaagtgtggagatccaaccagattgtgaaaaatatataacaaatctgatatggtggggataataataaaagggtcatgtagcatgtcaggtaccattctgaatgttaagtattaattcactttaattctcacagcaaccttatgagagaggtgttattagtatcttataggtgagaaaacaggcccagaggtttgataatttgctcaaggtctcgaaactagtaagtgacagagactcaaacccagacagccatgcatcagactccaagctcttacagaactgagtgtgagatgccagagggaaggccctgtggcaacgtccagcaggtggttggaacttgactttgtgacccagcacataggtgagagtgcagggtcatctgggcagagacaagggtggaggctgtaggcaatggtaaaatggcccaggaacagtgagtcaggggcaaaacctgaatttggtgggtgggagaaggaagaggagtcagcaatgagtgaaagactgaccagagaactggaggagaatccagattgcacggtgttaggaaattctaaagaacaatgcaatcagaacaagtgctgcagaaagagaacaggatgagaatggataacaggtcatggtgaccttggagaaagtggattcagtagacgaggtgggcggggggacctccactgtaagaggctgagaagtgctgggtgtaggagtggctggctgcaaggagcagtgcagacaaagtaagtggctgtgagagaggaacatgaaccctggatgcgggtcaggagacttgaatccagatgccaactctggccttgattaggtgtgtgaccagagcggaggcacttcacgtctctggggtgctgtgtccttaccagtaaaatcaggagataagaccccactcccccaaggcagttgtagggatctgaggggatgatgaacttcaagcacctagtgggctgtaagagttaagttggctgaggtcacatgagataacccccatggaagtagcttggaatttgaagagactcttcaaagatgaagcctgatcatcactactttggccagacacttagtactgatgagtcctccagtcagctgagattttgggatgttgtgggatgcctgcccaagccataggctaagagaagactccaagatctatagttcatatggtaaattgcaatgctgggatttgaaccctggtgttctgccttgctgcctgtaccccgttcagatgatcacctggctgtattggactctaacccagaagaaagagcgtccatgtggcaggtgtggctttacagctggctcagtaagaaaccttgtactagtcccttaacctcaattgctaggccagggaaattgctctgcctgactcctaatacaagtaggaagaaaatacatatggagttaagccttgagttttgcagacaaggatgcagtggggaacctcgattgcattttctgagggacggccccttggctctgataccacagtgtgtgcacggagaattctttcctgtcctctctcactgtgtttccctctttctcccatccttcctttctcagtctctagcattttaaaatcttagattctctccccctcctctgattacacatcccattcctttagacattcacacagcaaatctgagctgggctcctactctctagaatgcattgtgctggacactgaagagatgagaagtggggattgggagataaatgtggctcagttcctgtcttcaagaggtttgaaatctagtgagaggagagcactaaacaacaaacccaaatagatacagtgtcttagactagaggtatgaaccccaggccttgggagcccaaggcagtgttaattccatctaaaggagcccagtggtggggtgcggtggctcatgcctgtaatcccagcacttcgggaggccaaggcaggtggatcacttgaggtcaggagttcaagaccagcctggccaacatggtgaaaccccgtcgctactaaaaatacaaaaattagccaggcgtggtggtgggtgcctgtaatcccagttactcctgaggcaggagaattgcttgaacctgggaggcggaggttgcagtgagccgagatcgcaccacaccactgcactccaacctgggtgacagggtgcgactccatctcaataaataaatacataaataagcccaggaaggtctaaggagaaggtggtgtcagaactgatcccggacaggtgagcgagtgttcagtccaggagggaaaggccagatgccaggcatgctggtcggtcaggacgggacctgctctacctgggggagggaacatgccaggcttcaggacgaagtgaacgacgggggcattgacagatgaaacttctttctgcctctcgctttctccctgcctcccattttctttccctttttcttgcctccgctccttttgactttagccacccctgctctcttcctgtctgcgtcatcctcgccctccttcatacccccgcctgcctgcctgccttccttctcccagactctctttatatttggggggactaatgcagcagctgtgctggggctccccctacccccctgcaggccaggccaggccgtgggatggaatctgcaggtttgttccattagcctctgtccttctgtgacagtccagacaatttatacaccctgttggctatggccgtatgttgtcataacctgggtcatttcctcatttaatgctgcccataaactccaataaaactgtcctggagcccagtcgtccaggggagaaggagagactctgggtttcgaagggttggagcaggggcctgggcagcgggtgtgcagaaggtgagggggcagcgggtgaagaggagaggactgggccatggcgcaagcccgacctgatgagtgctttgcttctttccctgtccctgccgctggctgcagtgtgtcagatcctccccaagggggtggtcgctgtcctcggaccatcgtccagcccagcctccagctccatcatcagcaacatctgtggagagaaggaggtgagtgtgaggcagggctggggaatatctgtgtgctggagcctgtgcccagggtccaaagatagggttgattctcaagggctggaagagcctgtcaaggctgggttggtatcattaataacaacaacataaatacaaatacagaagcagtgggcttgccctgctccaggatgtttgcatggaggggtctcggaggaggtgtttgacagcaggaatctgaagcggagctcctccctgtcttagggtcccatggcggtgcccccagcggcctcttggtggtggtgggtagagggagaggctggagaggctgatgggcatggcaggccaagcgggcagacgtctgagcgtccactctcgtgtccacgtgagcagctccctggttatctgtttacatatcgggattctggggaagaatgccttcggggaaggcattgccacattttattgctaaaataaagtttgaaagcctctgtcatataagttctctagaaaagagattttatcttgctttcttcctcattcaccagttccagtgtttgcttcttcaagcagcacattcttcctcagatgtgactcgaactggaggctctccagtttcaaagtgttgagtccatttgctctagttctgtttccatgggagaaaaaaaatggtagggcacaagtttcagagtgactgcccccctccctattctgccaactctccccctcctttttccccagagaagacaaactcagaaattcagagattctgtctagtcctggcatctttcctggtccttcctggatccatcaatccttccccttcagatatatcctcgggagacagtgagaaattggccccttagcccctgtctgccccaagggccttccagccaggtccttagggggcagatggagcttggtggtcaggcatgaggtcaggagctgggtgggggcgggggcagggacatgggaggaaggctcagtctcgcttctgccctagaggcctggaggctcagccttccagaagctctagtctcaggaggacacagttcttagaaacaggaggaacacttgctgcaggagggactggatgcctcctcagtgagccgctcctgccagggcaggagcaacagacagtcctctgcccaccccatgcctgctgggagtctacccctctgatgccaccactgtctcttatgatccagggctcagtgagtccctgacgctttgggcagaagaatatttatcttcccgattttaggagcccactctcagaattgtgtgcacgtttaagtgccgcgatcctagtcctggtcgcgttggtcctgctcctccagtagctgggcctctctctgtaggctgtacccttgagccttcttacatgggctggggctgacaagtccccatcctcctcccggtcacatatcctcaaatacaactctgaggccagcccaggccacagaggagctctgtcctactaggtccctcccagcctctcccaggccgtggcccaggaagttagacctcacgtgtaatttacatctttcttgcggcactctgagaaacagcttaaatctatggcaggtcattattgtagcagtggctctgatcttcactaagtggggcagccaagacttcagctccccatcttctctcttctgcatcctctttttctttcctcctctctcccttctcccccaccacacagtctttgctgtgcatcacatcctcccccaagccccactccaatatggcctccttttggggttcagtggctatttaatctcagccaacacatcccttcaccctgtctggcatttcaggccagaagccaagcccatgatctgcagccaactcctctgcccctgtgccagaccagccagccagactgcactgccctgggagtggccagacgcttacccgcctttgtctggttatgtttcttctagagcaacttttcctctctgctcagattatgcatttattttaatgttttatgaggctgaactgccttatgctgattctcccctgctccagggaaaagcaatggagttctcacccaggagtccattgctttaaatgctgctgacatctctgcagcccttgtggctggctgccttctgccttgctgctcccctctccattctgctcacctcttcttgtcccccacacacctccgtgatggcttcctgggatacatttgcaattgcacattgagtatagatcgatctttgtcccagagagggaaccataggaccaggactgggctgggctatccctgcctagacccagcagagcccagtgggcttcaaggagactgtgccgaaggctccccatcagctccccttcctcagccctcaccccctgtacgcacaactccaagagctttgcgggagctcctacatttggggaggaaggagaaagagccttgcgcaagcacttattatacattaggtattgaactattatataccctacacacaggttcacattttatcctcccagagctctaagaagcacctgtggttatctccattttaatgatgttttgacaagttaagtggtttatctgaaaatcacacagcagaacctggatgcaaacccaagtctgtagactccaaaacccatttgttcttcaccttcctgagtccttcccatccatctctaggatccgtggattcacggtatctctaaggggtccacagtactagggggtgctaaggggttgtgctctattggattcgctgctaatggaatgtggtaggctagagggttacacagggacgaccttggtcagaggtgttcaaacgttcaaaccagccagccaggctaccctgcccctgtcgggccttcccctctatcttgcccatttgtgaccttttcctttcaaggtctgtttgttattcactttagacagagtggatgggatacaaaatacaagcgggaagaaagatccgttatgacacagatcaatgtcactctttagaattgcctttcataactcaccagactctcccccattctgcatttttcagtttctggtggaaaatattggttgccctctccctatggtttaaaggctaatcctagttgaattcagaagtttttcccctagtttctgctaaatctttatcctcttcccacctcagtctcagaggagctctggtctccagctgacttctcccaaaaatttaaaaggataaagtaggagactcctacagagaccatcccaacatcttcgcagactcttggcaggataagttgtgggccagagcaggcagagacaattcttcagtcatttctgaataatccattctggaagccaatctactcaccaccaggaagttcttcctgctgtctactatcgatcttccttgctttaacatctatacacactgatattcagcttcagctcgctcagctctggacaccaggggtgagagtggaagaataaaatcaaggtggatggcagattattacattgtaactttcctattacctaccaaatagcctaagccgccaataaagcagccatcacagcctcttaagatcttttcctgggagaagagaggcagaaggcaggacagtgggtcctggaaatgtcagtaatagatgcagagggaagctgacactgtcctaatgaagccaaaccacgtatttatttacctggctgtgttcagaggttctctagatggtttctccgcctgcagggcttccttcctccatgtgcgcatgtgtgtctgtgcgggagcccatccccgccccacttcctctccctgggcattccccactgaagtttgttgggagctggttactatacacctgttggctgggctgggctgatgggactcttctcttagtcccagggtagcgatttttctctttctgccgtctctgctctgatgtattaactacaaataaaatattctaaggattatgctttcaagagccaactgtctctctgccagcagcaggcagttcctctaagaataaagatagattcttttgccttctcaggaccacagaccccagcttgcagacccacggtgcattcatccgggtctctggacaaatagttttctgtcctggggctgcttctttgaagcatcatcagggatgtcatcgctcgtcttcctcccacggagtgggtgccctgggagctccttctcccattggtgtctggcgaaggtgttacataaaagaactcaccctccacaacctcagctcactcatccctctttcttccttttcacccacctggatcctccctgctgtccgtttttgctcctcttgccaggtccctcacttcaaagtggccccagaggagttcgtcaagttccagttccagagattcacaaccctgaacctccaccccagcaacactgacatcagcgtggctgtagctgggatcctgaacttcttcaactgcaccaccgcctgcctcatctgtgccaaagcagaatgtaagtttccccaggctggctctgccccagacagtccagtcttgttgattttgccctgattccctgtgcccctggctggagaccctccaggaaggggaggcttccttcagatccacagggctgataaccaatgggtttgggcattcccatgctcatgtgtccgtgtgtgtgtgtgtgtgtgtgtgtgtgtgtgtgtttaagagagaaagagaaaaagagagaaagagagagagagatggggagggagtccatccaggagtactacttgccaggactccctgggcatgagtggaacagaggggaactaggttacaaggagactggccaaccgccaagcctttttgcatctgcaaactcaattcccacattctcagcttcattgtcaaggagatacaaaaagagagagagggaacatataaaattggatgcatttgtacttgatgggttgaagaacttcttcccctggagagcaggttttgctgatggaacaaggtccgaggtcaattcctgataaagcattttttagcaaatgcaggttttggaaatgtgttttctatgactctcagtcaatttgtgacataaatttagtgtttatgagatttagctaatttaagccagcaccttccagcaaatctgtgcatctgtgtgctcccggcggcagctgtgcacccacatgtggtcaaacaggtgctggccactggctactgctggaacccagtgcctgagccccaggcacctgtgtcctgcgcagctcacctgtccagggcttacctgggggtttttatgggttgcactgcagagcgattccatctttattagggctcctttctatggcttctcagaactgctctgccttctcaagcccttcctgcatcctggaatccccacagtctccaaatacaaaagccacctctctattaagagtcagaaccacctactttcccagacctctgtgcctggcatgtgctttaattcatttatccagtacaattttattgaatattcaatctgtgctacccaagaaatcaaggaactgagttccaactcagctgtgaccacccagtgggtttggaggtgttagatctccccatttcaaagttgaggaagttgagactctaggaggtgaaatgacttgcccaaggccacacaacttaagcaccagggcccaaactcaaatacaggcctcctcacttcaagttgaaagctcttccagagccctgcagtggatgcagagaaaatagggcccttgccactgatctgagaaggcccagagtggtttatgctaagtgtcaaatgtgcaatgtggccagtcgaggagagtgtccctgagtacagggtgctagataggctttgggatgtgggcagggcttcaactggatctcaaaggataaaaatgatttagaaaaggagggaaagagataggtcatgccagatgaggagcaagagagggaggcagggatcctgatgctgtgcctaggggaagtaggttggagcctagagtccatgctggataaagatggaaagagaggctggggaaggtagcagagatccttgtagcaggcaaggaacatggacttggtcctgtgtcatctgcgagcccttgaaggtcactctctaaggaatgtcttctaaggcgaggcagttctcatcatgggtgtgcccttgtggaacaactggttttgggtctgtgaaaagggcaaaggagttgggaactggaattagacccaaggagctggggaccctcagacgtggagaaagaaagttgaactcaaagccttgttcaacaggcagaccctgagtggcaccagcaagttgggtgcattcaggagcactccagtccatcactcaggcagtcaacaggcgtcttcgagcatctcctgggtgctgggcacccttacactctatgtacggcataagagagcaacacgcagcctctgttctcaaagatgaagcagacttgatggaaaactaagcagggtcgatggtcatgaagcaattaacacagtaaaatcggtgcggtggctcacacctgtaatcccaacactttggaaggccaaggtgggaagatcacttgacatcaggagtttgagaccagtctggccaatgtagtagaaaccccgtttctactgaatatgtaaaaattagacgggtgtggtggtacgcgcctgtaatcccagctacttgggaggctgagacacgagaatcacttgaaccctggaggtggaggttgcagtgagccgagatcatgccactgcactccaacctgggtgacaggagggaaaccctatctcaaaaaaaaaaaaaaaaaaaaaaaagacagtaaaatgataattgaggtacactggagttctccagcagggcttccatgaaaggggtttggcaagaaatcagtgaacatagattctaaccccctcagctagagaagaagaaagggaggcccagaaggtagcttggtttggctagagtctcataattagtaagtggtagagcttggatttgaatccagattctgtgaatcacagtccagtgcaccatcgtcattacacctgtatttatcaaatgggtttcctctggatctgtgatgaccaaagcagtagccacaagccacgtatggctattcaagtgtacatatgaattgattaaaattaaataaacttagaaatccagttcctcagtcttgttacatttcaagtggtcagtagccacgtggctggtggctgctgtgttgggcagcacaagtgtggaacattcccatcatggaggaaagttctacaggacagctcggctttgatgatacgtgttttgtggaccaggagttttatggcaaaaaaataatgtttggataacccttcattctatttcctcctagtggaggaagttgacgatacacattagcgtggacacactcagatgtcctgtggccaaaacatgtatttgcttcattttctttcaaataagtttgaccatgagccaaaaaagaatgctgatcttacagcctgaaggatgttcccacttcaaggaacacagtgggaagctctgcattccactgggtggttttcctcctgtggtgcccttggaccatcgaatggtgtaacaggctcaaggattctcccctagaactgactgccacacgcccattttggcaggactgaactggtgtaccctgtgtacacagcggggttgttaagagacagagggtatccgcaaatgtctccaggcaaagatggtcctgcagtcttcctcaatgctggtacaatatctcaccaacctgacaggaagttctttttgtgtctagtcacagtctggcttgcttttaggctgagacttgtttcctctgcttcagctcttgctgggcttttgggaaacaggttgctcagatgtttgctaagcatctactacacactaagcactatgctaatactgttgcctcccagcccagggctcttcccattagaattatgacattccttgacattcaaacagttccgtgcagatggcaaagcactttcacttaacatttctccattttacctccctcctccccggtcattccagagctgagaaaacagagtcttggaggtattaagggacgccaggtcgcacagctggtacgtggcaaagctaagactttatcttagtcctctgatcttcaagctggctcttccctctccatgacccccttccaccatcatggtctgcacaaacagccctggagcagtggttcgagggtgggctctgcctggcaggtgcagtgttcagggaagggcagagatctctctgaacaacatgtgcccttgttccctcgagcaggggtgcaggacagctaagcacagacaaggttctggagcagatgtgcctgtccaggtgcagtaggggacggcccacatcccagcggacttggcaggcacacaacacagagctgctggaactcacctgctgaggctgctgagggactccagtccccaccctccagggccagagcagggaaggtggagcagagcagaagttcaagggcacagaggattaaaaatctaatcaagggatgagaaaatgagggaccgaagggaaatgcagctcagagctctgaaggagacactcttccatcttccttattaatgcagggctgagagatactgtgagtagaattaggagcagaatctaattctattttccagccatgaaaattaggcataacggagataattccatggagaatcatgccacttactctcttccttcccaaaagtagatttttaataagcaggttttggaccaagtagagagagattgtatattacattatttttctttaatgggaaaaaaagaacatttgcaagtgcctgtttctgatgaggctgggggaggagatgtgatgagcagcccaggtgtggtcctcctggtcagagctcacagagcctgagggagttggctactggggggcttccaaggagagttggggctcaccactgtgggtgcccagggcctgttggtcagatcacccagccctgccgcggatctacctgttgacctcaggctgggcccgaagccacaggtataacatgccgtgtatttccctgctatcttcctacatgtctcaaatcttattttttttccttcttttttttttcttttcttttttttttttttttgacaaggtctcactctgttggccaggctggagtgcagtggcgcaatctcagctcactgcaaccttcatctctcgggttcaagtgattcttctgcctcagtctcccaagtagctgggattataggcatgcaccaccacgcctggctaatttttttatttttttgtagagacaggtttcaccatgttggccaggctggtctcgaacccctgacctcaggtgatctgcctgcctcggcctcccgaagtgctgggattacagctatgagccactgtgcctggccttattttattattattattttttaatgcttgcttttatatttctttctgagttttttgtttgcttgtttttgtttgtttgtttgtttgtttttgagacggagtcttgctctgttgcccaggctgaagtgcaatggtgcgatctctgctcactgcaacctctgcttcctgggttcaagcgattctcctgcctcaccctcccgagtagctgggattacagatgtgagccaccatgctcagctaactttttgtatttttagtagagacagggtttcaccatgttggccaggctggtctcaaactgctcaccttaggtcatccgcccacctcagcctcccaaagtgctggggttacaggcatgaaccaccgcgcctggcctctttctgaatattttaatgtcctttttgtggttacatggcctgtgtccccacatcttctgctacttattttctacctgtgagatcttggaaaagtgactttaccctctacctctgttgtctcatgtataaacagtgaaacctcgctcccgggatggctgaggggattcaacagatgacacctggagagtgaataacacagtgtccacaccgaggaaatgctcggcacacatgagttttcctttcctcccttactctgatctctttcaaatgaggcaaggccagacctgggagcaagagtcagctgaggtcgggctttgtcctcctaccagcctgtgatcaccaaacgtggcccaggctactagagaggagcagacttggatctcgaggcagtccctgcccttggggaggatgtgctgtcaaagagaacggcaggataccagagtcagccaagctgcaccaccacttgggagctgtgtgacacggagcaggtcaatctgcctctctgagccttagtttcctcccatgtaacaagacgataataatgtctattgaggtaattggatgggaaagtaactgggcccagaacacgataccacatttaattactgttattttattctgcaactctgcttatggcagtgggggtggaggatggggagtaggcagtgatacccaaggccctggaagagtaaccaggatggtagtgggccttccctgtgctgtcccccggaggccctgtgggaggccttttgctcataatgataaaaaattaaccatgcagctctgtgctgataccaggaaggtcacagtcctcccattacagagcacttactacgtgcccaacaccatgctaagggtttttatattatctcatttaaattttagattctcttatttaaaccgtataactcatgataaccgtataagatgggctctatcaacattctcattatatgcagaagaaaagagagattatctccatcttcaaggtcacatgattcctgctaccttctctcccagctttcctaaagaagacagagaagtgagggaccatctttcctacagtatgggacgaccgagaccatcccatgtatcagagaccagaatgtggaatcagataatctgggtttggatcctggcctgtcccgggacctctgaccgtatgatctcagtcactgaatttctcccgccccagcaattctgtcttgactcagggataataatatccacctcccagggcagtcaggaggatgaaatcagttgtgtatgtgaaggaatttaggaaacactgaaggttattctcagagcagggatgtctaccaggtcccagtagctgaggcccaagctggaaacacatcctgaaatcaggaggctgatgggaacacagaggccggggtcttccgacacccattcttgccattgtagaagggacagcctcgatggccaaacacggccacctacggtccacctgtgagcaagaagcctcagctggctcctctctccctctcctcttgccctgctggtcttccctgcctgttcctggagcaaagcttaggtgcaggatgggacaaatttgggatgcaggtaaaatacgtcattccagaacttgaacttgttctgtgccccttccccacctggggacaccttggaccctcatcttgtccctctggtgagggttcgctccatggaacaggtccgacaaccgcacaccctgaggcatgggcacctggcagggggaaggggaaggtttaggtttaggacactatgtgccatattgaattcatactatctcattaaatcctcaccacaatccgcaaagatcaatcttatatgaactgcttcccacaaggttaaaaagtgctggtccaggaccaaggcactactccagccagtaaagagggaaggaagcttgttgaaagaggtgtttatttttataatattttttgatacaagggtcctctgtgtcccctgcagactcatcgcttaggtcttggtgtccttgtcctgcggctgtgtccacccctggctgtgcctttccttacctcgacatcctcctcccacccctcttggcccctgccttccagttccagaagccagcctcccttcttcctcccagaacagcctgcctgccgactctctcatcgatccgtcccgctgcatcctgagcaaggctaataggttccctaggcccctctcagccttagacttggcaggcaggcaggcaggcctgctgctgggccatggtctggaaggagaggagggtgggggtggaagtggatggggtgtggggaagagagcagcttttaacccctgtgatggcagctgcctttggtgaatcccttagttccattaaacagataaaggtgaggagaatgacaattcgaaaatgccaaactgccctgaaaactcttaatactctcaatgtaactaaaccacacttttcctaatgtaaatttcttccactgcctagaattaaaaagtatcctcttctgattcataaaattagaggatctctgggctggaaagacatcaacgttttactagttcgactttccatccactggtttaattccctctatagtgatcctcaagaggggctttggtctttccttgactacctccagtgatggggaactcactacctcatgggcagcccactgcatcataaaggaagagttattccttacgttgagctggagtctgtctccctgtgacttccactccctcatgactcctgggtttagtccttgaagctgccaagagctagcctgcctcatgacagcccttccttctctccctctggccaggcacccaagtcagctgctcctcaagtgacatggcgacggttcctgcctggcactgctgctcccctgacttgttaggatttagttactttcttcccccacagtctctacatcagtccaatccagcaagcaccatgcaccctgcctgcactggggatatgcagggaagtctgaaatgggctccctacctaacactgaaatcatttatgcacatactgtatattacaaatatatacacacacatctatgcacatacacatacttacgcatatacgtgctctcaaatactttctatggtttaaaaccaagactatctttggtgggttggataatcctgtaagaggtgggagacgtgagaagagggtggaggctggagaatggagagaaggtttcagggaggagatggggtaaagggtagttggggggtgagtgggaaacaaggtttgttaagccccttgtagttgccatcttcttaatgaccctgtaatgtagtcactccccttattccacagaaaaggaaactgaggcacagaggggtggggctgttgccatagtaacctgcctggcattgctggggttggcactcatgtccccagactgggttctttgtgctgagccaggtgtgtccaggttgggaaatggaacaactgactgataggcaattctgggcgggatgcggacctcccagaggactcgccgcctcctcctctctcctgtccccgccccgcgtctcagcacacagagcatgttatatgggatggggaatgatgctgttctttgtttaaaggacagcagaactctccaaggggtagcaggctgggaattgattggaataggtccccagtttatctgacatctggggggctctctttccctgggagtttcgtgcacctgccatttgcaaaggaataaagcatccccggcagcctctgccaggcagcaccatgctatgcataaccctgctgtcatcccccagccttccctgtctcgtcccactgaatttcattgcctgtctgaagaatcccagggaatttggcctctttcccagtcaggctccaaagattcttcatgctccattctaggacgtggggaggttgcctttgccaccccttgcttgttcacctctccagctgtggggcaccctcacccacagcctgctcaggagatagctgagactccagatgcaccagctccgtggcctccctccacctccttgttaagagtgtcttttggatcagacacccagacctttgtccaggtaggagttagcttttcacatcatctctgaggaagaggcggtaaatactctctccactttacatataggacaaaatgaggctgccccctaaaaaaaaaattaaattcaggctgccaaacaaaacggggatgtgatttgaacttcatcagcaacttagctgcgagtgccgggaccctaaactcctgagggcagggactgtatgtgacccgtcttctctgcctggtgtcctgtctgcacaatgcctggcactcaggacatgccagagactgttggttgaacagatgtgtccttgcctgactcttcatctgcctcaccgcgcctgcccttggagcacttctgggaatgggtaaatacaggagtaacatggagaccgtacatcccacttcccggcagcctttctcatacgatcacagtgagttctcatcctcctttgcccattctacagatgaagaatggagctttgaagaggttagacaacttctcaaggtcacttagccaaggagggctgaccctgagcttgaatccagagctttgggatcaggattggcagggagtaacctggcaacatcagtgccactgttgtgggggccagtggtgagggcctgtgaggggcacagatggcggcagcagagagtctttacaagtctccatcgaaaccctgtcagggaagagaggaaaggccagcattgtggtttgcacagctgggctgtttctgaagcatcttaataaataacaggccttcccagggcttcttcccaacctgccacagcctccagctccctagaaagccttctcaaaacaggtgacaggaagacgggttggcagcaccttcccagagctgtctctatcaggccagtcccttgggctccaactccactaccctctccttcctatgaagaaaaaaaaaaaaaaaagcacagacacacaaccagcatcagcttccctctcctaatccctgagacacgtgtctctggaccttcccaggcactgtgcccactgcctccagctgagtttgtcctccgaggcagcctggtctcatggtaagagggttggatagaaatcagaaaactgagatcagaattctggtcccagctgtgtccccgtgtctctgtttgctgagtaagtcatgtcaccaatctgcaatgcgaggaggtggatgggaggctctccctcctttttggcctgggtggtgagtaacctatgcaggaaagtcttccggggttgtagtcaagccatccccgagttgaatatcccatcagccagtacagaaaccagcagcacggggccttggactggttacaaagccaacctttccctcgccatcccagtgtgtgaggccagttgctcgtccttcctacctccgattctcctctgtgctggggattataatactttatgggattgtcgtgaggacttacatgagataagccatgtaaaatgtttcgcacattaactggaacacaataagcatttgataaatgttgcccttatcattgcttttgggagcaaacgcctacgtgatgtctttttccatgggaattgagaccacactctgcctcctgcacccccacatcacccccaccccccacatttccctcccccaccccatacacacataccctctgctggctggcatgcctttccaaagacaaggcagaattaagaccctcatgtctcagtgacatcattctggaacccctcctcccaccagggccctaggcatcaaatagctggtgggtgggagaggagggagtgagggagggcaggggtaggtccttggtgcacagtcccttttttctgttttgttctgggcccagattcttgcctgctggagtgcagttcaaagcctgttcccttatgatcatcataatactttgtcttaatgcagccacaaggctctgaggagttcaaagcgttttactagatctgttttctgggccttgggatcttaagggaattgctcctccacctccaaaatgaaaacaaaggctcttacagagcccagtgtaacatttgtgagggtttaatgtgtccgaggctcgggcctgagcccttcacacgtggcctcttgtaatccttgccttggacctgagtgctggctgctgtgataattctaacttctcaattgaggaaactgaggccaagacaactggccacatggagaagtccatgaattagggaagcagactcaggcctggtggtctctgaacccaggtcttggtctctgtgcatcctatccggctttcgagggtggtggggaggaggggggattctcttattccacccaagggagcttccgtctctaccttaaaagaacgttctcgagggagtcaggggaggtgatggactcagaagtgttcttttattttagatgggatcattgaagcccaaagaggctgagaaacctgctcaggttatgatctgtctccttaatgctgtcagtggggccagaccccccgaccccacttccagcccacatctccgtgccttcctgcttctgcccaggtgtctctagaggcagctctgtggaccctcaggggcttcatcctctctcccctccaggccttttaaacctagagaagctgctccggcaattccttatctccaaggacacgctgtccgtccgcatgctggatgacacccgggaccccaccccgctcctcaaggagatccgggacgacaagaccgccaccatcatcatccacgccaacgcctccatgtcccacaccatcctcctgaaggtgggagcctccctctctcccccaccccctgctgagctccaccctcccccctccttgccttgagggtcctcctgagctgaggctgacggagccccgggctggacctgaactcttacaaacctctctctgtgcttctgttttcaatgagcggttcccgaaaaatgaaagaagaaagcagggtgagggtgatgtcgttttcagcactggggcagcagggcagtaggcaacggagacacctagatgctgccaaacttagaccctgctaagggctctgtggagaggtctgcgggttcctaggaggggctagggtggggcacctaaggggcttgggcagaggctgtctgccaaatggtatagaaatggttccgtagtttaacaacaggaccatcacaccagtgtgtactgctgaatgccagctctgtctttagtcctgacacggtgcacaacagttacacagcacttctgtgtagtcgatctcccagcgtagagctctcagcaatgacatgaggtaggtataatgtcttccctcacagaagagggaactgagactctgggagatgaacagatgcgtccaaggcccagccctgagtggagcagggctgagcctgcacaaccctctcttatctgcaaatcaggtagtgtctcctaagctcctggagttggaggggcagtgccagcccctgagtcagaacatgcacactggaaaccagaactctgtgagtgaggctgatccaagagagagagacgtcgggagcctaggggccccacacaggacaaactgctggaaatagctgggtagcatcggagtcacctgacgtcagttcctgggctggtggctgggctgggcatgaacttcggagagaacgggccccgtttccaggctccttggcggctcccccaacctctccaggcgcactggcctcttctaatgccattttaattgcacgtttaagcacaacctgccgtcttccactgggggagcgaggctcctcgttaacctctgccaagctgtgaggagcccgcagacactcagatgattgtctcccctccttccctccctccctcccagctgcccctcctcagctcgtttttgactcagagttaataagagatttgaatgagttctctcagtactgagggctgtcccttcagcccgttgctatagtaatcttccagagctccaaagccatgtctgtctgtgtgcgtatacccaactcacattatctctctctctttctttctctctctctctttctctctgacacacacacacacacacacacggaaacacaatatttttctcttttcttccttttcctctgttttctcttatgcctggagccatgatcaatgaagtcattaagggtagaaaagctccaccaagtttcacgagaggagaggggccctctttagggaaggttgggagcaggcagtgagagcttcagcttagtagatagatgtccctccaccacccttgtggaaggtagctcagaatacacaggttccccctgtggtagctggagcctgcctgaacagcccccaggtagaagcttctgggggccagccttgtgccctccatagctcccagcatctgatgttgcactattattttttttattcgaatagcattactagttcattgttgaaattttggaacatatagaacagaaagcacatagaagaaactaaaaattattcacaatcctatcacccagagctatttaaccactgttaaattttgatgtctgtttttttctgctttacagacacatttttcccccaaattattgtcatactgcacaaacttttctgtaagcgctttttgtccacacttaattctatgccgtgcattttccccatgtcattaaacatttttctagaaatattttaatggctgcctcatttcctatcatacagagttcccataatttatttaaccatcactttattgttggagatacaggttgtttcaaatcttttgctacaataaataatgctgaggtgcacatctttgtacataaatctttatacacattcatgaatatttccccagcatacatttctagaagtggaattactgagttaaaggtacgcatgcttttaaggattctgatatgatttgccagattgcattttagaaaggctgtaacagtttacactttcgccagcagcatataggtgtcttatagcacccttgccaatactgggtatgttaattaaaaacactttataggtgtgtgtgtgtgtgtgtgtgtgtgtgtgtgtgtgtggccatgcttttgaaggaagctctgcctgtagtgtagtgatcattattagcaaatggttctgctcgatgcctcagggctgtctttcctgagctcacctgtcagccccaactcctgtgacattggagccacactgatcaatgagcagcaaggcttcaggaaagcctgttccctttgcccatttgccttcccaatggcccaggcaggcaggcgttccatcaggcctggcctctgtcctcatgcttccctggggctccgtactcttccctccaggagggcacaacagggcctctcagggcctcagcaaggatgggaagcagagtgggcagggagcacacggggcctctgggagactcagtgtgcacgtgggagtccagcccctagagcttggcaacactctgccatctcttgatttcaggaggatttgcagagcaatccctgattttattgagcggctgttccagcaacgaactccatgtttacccagaaatcaggccttaaaaaccaaggatctcttgtcttttatctctaggacagcagatttcacaaagcgggttttagctccccactgtgaccccgcccggaccctctgcccccagcctgtcgctgtaagcagcgggctcgctccgtgggtcgcatccgtctaggcaggggtgagatgcagcagcactcttacttggacagtgtgattgtgtgtgtgcagtggggcgtaggatgggttggtcatcttgccacatcatcctcttgaaagtgaaggaggaaatatagcttggcctggaggaagaaggagcctcaccaaagaggctttgagctcccttgtgccctgagactcctgccccagtcactgagcatttgccctccagcttcccattggaacaaccatgatagagttacccccgacctgctcctcagggagcctgcaagtgttcctataagaatcctataagattacaggcgcggtgcctcacgcctgtaatcccagcactttgggaggccaaggcaggcagatcacttgaggtcaagagttcaagaccagcctggccaatatggcgaaatcccatctctactaaaaatacaaaaattagccaggtgtggtcgtgggtgcctgtaatttcagctacctggcagcctgaggcaggagaatcacttgaacccaggaggcggaggttgcagtgagccatgatcgcgccaatgcactccagcctgggtgacagagtgagactctgactcaaagaaaaaacaaacaaacaaaaaaagaagctcacaaaattatttgagttccttgggagatgaacactatgtaagaggaaaaatgtaatcatccttggtctggtttctcctccatccacctcaatagtcatgacaaaacgggtctcccagtggcccagggctgcagaatacattatgaaaatctagccgactgtcaggagggatgagggtccccagagagaacggggctcattattttcctgatctacgtgtcagtttctatagtacctgtcacactcaaagccaggcacactgacggggaaggttggctaggggtatttatgacgggtacaaagatcagacaaaagggagactcttctgatgtagcagttctcaactgtggagtgatgccacactgatgcgctgtgatcaagggtgaggcatgccacaggcaactgattccttacgacaaataaaggacccaagtttgcaaatgagtcacttgtttccgacgtcactgcagattcaagaatacccttatgactctgccctgcactctgacagagtggagttgatttgcattgctacaacctacggactctcttatctatgccagggccccaaagagagttgtgtttgtggttccatcagtgtgacagtcctgaagggggagtatagagtttggataaaagcactgaaattaggctgcctggatttgcttttatcttttccattaatgagacatgtgatcttgtgcaagtcacttagcctttcgttgtgtcagtttcctcagctgtaaaatggggttggggaggaataatagcgccaacctcatagagttatcccatgtagaatgcttgagagtgcctgacacatactaaacagtgggttagtgttagccattgttattgttaatagctgtggagatcattattgtagtcttttttattatttgcttcatttccctaaaagtcattttggtttcagtaatgtctggctatatccatgggagtatgttgtgtacaagaacaccagctactacgcatgccactgcaggggtagggggccaggcggaggtggagagaccccgctcttgagaccagaatttctgtgctccatcctctaagatcaagggcaacataagaactaatcaagatgttctgttctgcctggtgccaaggggcagtgggccagacaaatggtagacacttggaacccctactgctcatttgcttcaagtgagtttttgttttcttctctaatctccttctcttcgccttgcaggcagccgaacttgggatggtgtcagcctattacacatacatcttcactaatctggtaagatgttctcacagctcacctccttggaagagagtgttgtcagtggtcaggattgatggattataagggaaaaagcccaggggatgacgagtacaggagatagaagcagaggagcagaagccaaccagagaggcagggcgtcctggaaattctcatcccaataattctgagccacaggagaatgaggatttggggaatctaatgcctccattcaaatgccgctagctacataaagcgaattctgggctgtagtgtgatggacgagcctcctcagtaggtccagttactggcctgcagtctagtctctacatggacttagggatcaggtgtcctaaaaagtcctgtgaggtttagaagatgacagcccagagagacaggcttggactctgagatccttgttcttttccagctgtcggtgtctatgaacagtcctttccaggggctgctgtgggattgttaaccctgtagcatctgacaggcctttgttctcagagttgaaacagaccttagaggaatttagtgtgacctttcttctggtatagggactcccacaacaggcttgtcaggaagccgttcagccttctcttgaacttgagtagaagtgcctagtttgccaccaccatccaaatacctgccccattgttgggcatcttcatggtagtctagcgtgcacatagatgaaagccacacatattatatgcgcgtagcttaagaaaactttttccaagtaagcacacctgtgtaagcagcacacagctccagaaatagagcattaccagcaccccagaatccccctcatgcccctcaaaacataaaacagatgaacttgtttcctttttttttttttaacctaacactgctgctataaattagagcattaatatgtaaaaagggagaaaaggattagactactcccagagcaaagcaaaagcatttgcttaaagtaaggaggcatctgggggagcctgggcaagttggcaaaggagcaaagagagattaaagtacagttgtgttccattttgggagcctgggaaatagaaggaggagagggaaaaggcaggccagtgccagcctgccagagaggctccctaaattaggccggcaacatgagtagaggaggaaggaactgggcaacgaggtgtcgctggggtgatttagcagatggaaggaagccattcatttggaatatgagttcccaggacagtcaccggaatgaggtggagttgcttggcttagaggtttttaagacagcatcctccacagtgtaccactatttcccattcatagaaatcataagaatgatggtgatgatattatctagtggaaaaagcactggcctgtgaagtcaggaggcccagagtcaagtcctgactcagccttatgctcactgtgagcctttggttgagtcgcagtgactctctgaaccacagttttctcattttaaaaatggggacataaaaccttacaagtttattatgaggattaactggaattctgtaagtaaaaatgtattttaaataacaaagtcctatatgtttctaaggcattatatttagaaaaatatatagctctatgatgctttcagttttcaaagagcttttctcctttttgggtgggcatgaatgagatcagctttgggaattaacaggactcatggaattaacagtttgtaagtttgcaagaggaaatcatgatgaaaagtaactgtataaatgatgctggttgaataatagtcaagaaaacgacagcagaaccattgcaaaaatctgccagtaagagaatattctagaagcttctcatgagtgtgttggctttctaaaagggacaaacctctaataggagtaaagaaactgtttttaggaccactctttctgcccagttgcagttggtgttttttttgtttgtttgctttttattttgtttttgtgtgtgtgtgttttgtttttgctttttttgagacagaatctcgctctgtcacccaggctgaagtgcagtagtgccatcttgattcaccttccaacctctgcctcccaggttcaagccattctcctgcctccgcctcccaagtagctgggattacaggcacacgccaccatgcctcgctaatttttgtatttttagtagagacggcgtttcacaacattggctaggctgctctcaaactcctgacttcaggtgatctgcctgccttggcctccaaaaaaggctgggattacaggtgtgagccactgcatctggcccagttggtgttttgggccatagagggaggggcttcatccagagggtaatgagttgtcttctgcattctccagtcccttctccccaatacagatgccagctgggttttcattcttatttcttctttctctgaatcccttggggatctccaccatgtctcatcactctgaattctgctacagtgatgcagtaggtcctcagatcagcttttagagaacaagcatggtgaacgggaaaggcatggatggaccttggcattaggtactcatgactcaaaacttttgtttgactagctactggctgtgtgatcctgtgcagtttacttaacctttctgagccccaggaacctcttctgtaagtggacactaatagtacctgcctcgggagataatgtacacatagcaatggactcacaatacgagtttatttaggagaaggtgttattttaagaagtccagcttatgcctcccatgggctaaaatgaatggaagatgcttattttgctccccagccatgcatgacctgtgaaagtgactcctaaaatgccattttatttatttccagataagaaataggactaggtagtatggttattgtgtgtgactgaactgaccattgtagggtttatttgtgtcggtaattactgagtaattgatcaaatgcccatacctcactcccatccaggcataaagaaaagtgattgatttagggcatctgtaataaatgaattaggttgactgctgtggattctgtcagttgattacccatcacaagaattgggacaaaattatccatcacgaatcgaacttctaaaccatcagttcatttgaccctatagaaacacagcttctctctctgtcagggtccagtcagcagaagagtgagtgttctaaccctgagccttgggtgacagaggtgactgatgcaataagaggaactgagccagagagagcggaggctgctcgggggtcacacagccatcacaggcggagctggaagaagctgggcaagtccagggaagggccaggtctctggtgcaggggaagctgggctcagtgacagggtgacagtgaggtgtcaggcaatggagagagacacttctgcaggaggggagagagcagcagacagggacagcccctctccagaacagaggaggaagtcagtgacaggaagtatggagatgaaggcacacagtcagaggaaacagtgaactgacatctgggccttttatttatattatctatttcaaaatgagatctgggtggtcggaactgatgttagagacttgatcagtgaaacagcatcatgcccctgcttctggttctagtgggtcaggaatcattccccacagaggaaatctctgatcaacagacagcaatggcacctggttaaggtgggagctctggggcagagggtcagcttatgaggtccaaatcgtgagaacttgacaggtaaattgacagcacttggccagaggtcgggcacgcagagagcaactatgaggaagtaagtcctggcaggtagactgaggcagggggtcaaaagtccaggccaaagtgaagtggaccgattaaggaacaaattaagagaaataaaattactgtgcagagtcataaaagcatgccaacacagagaactagtttctgccttcatccagaaatcaatctgcctgcctgcctgcctttgtttgcagtttagtggcgttaattatattcttagtgttgtacaaccatcaccactatatatttctaaaacttcatccagccaaacagaaactctgtacccattaagcaatagctccccattccccctccccatggcctgtggtaacctccatgttattttcttctcagtgagtttgcctattctagctaggtgcctcatagaagtggaattatacaatatttatcttttgtgtctagtttatttcactcagcataatgttttctaggttcattcatgttgtagcatgtgtcagaaattgcatttcttttttttaagctttgtattattgtggtgaaatatatgtgacataaaatttgccattgtaaccatatttaagtacacttttcagtggcatgaagtacatccacattgttatgcaaccaccaataccatccacctccagaacatttttcaccttttcagaatgaaactctgtacccattagacgcaaactccccatgtctttttgcacccaggccctggcaaccaccattctaatttctctctgtatggatatgactactctaggtatttcatataagtggaatcatataatatttgtccttttgtgtttggctccgtttacttagattcatgtctttagggttcattcatatgtcagaattgcctgcctttttaaggccaaataatatactatgtgtgtgtagacacacacataccagattttgtgtatccgttcattcatcgatggacacgtgggtcgcctccaccttttggctattgtgaataatgctggcatgaacttgggtgtgcaaatgtctgttcaagtccctgctttcaatccttttgtgtatatgcctaagagtggaattgctgggtcatgtggtaattatccgtttatttattgagaaaccaccgaacattttccagaatgaccacaccatttttcgttcctgtcagcaatgtacaaaggtcccggtttctctgcaaccttgacaatacttgctatttttcatttttaaaaataatagccatctcgatgggtgtcaagtagtcagatgtgttttttatttctatttgaagtgtgcaaattggaagaagcaagaccacgtgactgaagttgagagtcctggtgattaagaagctttataatgagggaaagtagctgatgaataaaaatcacatccttacaatcagtcagaagtggtaaaaatccccagttcaggagcttatgagctgggacctttggaggttctctgtcctcatatgtaaaatatgaataataatatccaccttttaaaaatcttggtaagatttaaaaattagcaactgataacactgtacctggtaggtaatgctagctgctataacagataaacccccagatctcatcgtttcacacaatggaagaaaatttcttactcaattgaagttccaaaagggtgtttctggtaagcagcattccataaggttattcaaggccccagtcttcttctagtttataaatgtgtcctcttagagaccagtgttaggaaaacaacatggaagatcatacatgggagggtttatgggtcaggcctggaagtgacacgtattatttcagctcacaattccattggctagaattcatcacatggccacactcacttgtaagggaagctgggaaaggtagtctagccatgtgcccagggagaagaggaaatgagtttaatgatcacaaagcaatctctgccacattattaaattatcaatcatcatcacacatctatttcatgtatactaaaaaagcaactagaatcccaagccctggcttgtctttttagaggataactgatcctaaaagtggaaatcagcacttagttataaggatgtcagcttcccgtgttctcttacccgaggagggcatgcatagggcagttatagatgcactgtgcttattcggctctttactctgcaagggagtctctgtcttccagtcagcctctgggtttggttgggggaaacctttgttgtgcaagactgatggaagtttgaataaaagacataaagaattaagggcctctgggcaaccagtctaccgttgagacagcagggtggttgatgccgtaagagaagagatgaaggaggaagctcaatttgagctaataaatctggagggattatccagcaactaatgaacccagagagatatgcagtcactgcctaacagaaaagataagatcaccctaatctattatcagagagcataggtgggccctgtgcctatggcaggagctgccatctcagcagagagaagtgttgagatttaagggtaaaggtcaaaagtcagggactgccaatgaaagatgggaaataattgggcactggaagcaggaggctgtgtggtctgctgaccactgagctgctacggcattgcaggtggtgtgactagctggactccagcgccaccatttcattgccatgccccaggcagggccagagctccctgctctcggcaccgccgctgtgctggagggtagaatgctatttgtggggtgtcaacagaggcagtgggcacccagagtttttcttttggggaatctagagagaagggactgagagctgggtatgccatgttagaagacagggagaaggagtacatcagcaggaggcctcattattatagagggcaaggccctggactagcagtgaagcagctatggcttcaagttccagtcctgctactaactagctgggtgtatggcaatatcaatagttgatatttacgtgagtaagtgctaataagtgcttcacagttttttcccatttaaacctcacgacaactctagcaggagacacagttttatccctgttttagagatgagcaagttgagaccctcttcactctaccgcctgtatctgggtgagctattttaccttgctgggcttcggttttttatctgaaaaattgtgaggttgtattaggtgatctctaagggccttttcagccttggacctgtttcatcctatatgtggtttggggcatttcagttcacaatgccttggaattggggatgttccctggagtgaggggagaatgccccatcaggttggggagttcgtgtgactcgtggaagcagtttctgttcacccgacaggtcctcagattcccaaactatagtcaggtccaagtgagccctgcagaaataacccctccatgccccagtctctatcttgttttggcagaatggatatatgcagccaattttcctcccctgggttcgttttattgtcagtagacctgagcctatgtttatttttccaaaggtttatcagagagattagccataagtaatttgaaattgctaaaattattacagaaaggggacccagggcagacagagagggaaaaaataattgattccaggaggaaatgagaatgcacacagccccactctttcactccttgctttggtgagttgacgctactcatctttcaggacttacttaaatgtcacttccccaaggaagtctcccctgacaccccgcaaggttgagtctgctgccacacactctcccagcaccctgtgttcttgtttttgtagcattcatctcaagtgggaatccatttttctacgctaacctttccaccagactttgagcttcataaaagcaagatcaaatcagtcttgttcatcaccatagatccagtggcctcctacatagtaggcactcaataaatattgtatgagtgaagggagcattccataacatctggagttcttggggtagaagggctggccaagtaagataagtcatctctttagatcccacaggaattcagttcatcccaactaagcctcagacacaaaggaacctatctgcgtttcagctggggagagctgggccctattccctgttccgcaggacccccggtacttgcttagcctacatgacaactactccatctggaatacccttcctcccattctgagctggacagatttgaagtcaacgttgtgcaggaccatgtagggtggtttagttcaggatccaagagacacaatttcaggggttctgctgagtgagagtgatgtcaaaacctgaggcccagggttggcaccaagaatgatcactgaggcaggggagggcagaagagtgcaaggacagtcaggctgattgtgacaagtggtctctctgtcacctgggactgtttccttcactggccacaccatgcctgccttggtcagccttgatcatgtggtgtcttcaggccaacacctggcagctgactcatagagccagaacccaagggtctttagaagaaacctctccttcaggttataaaggccattatgaagtgatctagtcctgtcctctgtcccaatggcttggcatatgaggttgggtgagcctgattactatgttgacactgagaatagagaaagggtttaatggaagctgccagggcctcagatcagagagaacttgagttcctatctgggccctgccgtacattagatgtacatgcggcaagttacttaacctgttggcctatcagttttccctcttgtaaaatggagataatcatgcttatctcataacattattttgtgaagacgatgggaagtttctaatcctgagggttgttagtaaatattatttcccttccctctcttttttctcacttacctgtcaagtatttccatccttagacctcagtttcctgatttactgcctctagctttccaaaactctacagctgttatcagaaacatttcagttggcctctcacctagttgaactgtaattcccaggatgcttgagcctttcagttcttcacggaaaatgcaacaggcacacatgaacatatacacacacatccctatgcacacttctacacacacacacacacacacacacacacacggccagaagttacaatccatcagccagacaactttctagtgccagagcaattgattccaaagtgtagtttattgtaaaattattaagagtatccacatatttcagctttattgagccttttaggagaaccactctgcataatatagtatactttgatgaataaatatgttttagtgcaactagaaaaaagagtgatggagtgaaagctccttgtgtgtcagtctgagctgccaaggtaccaccctacccaatgcaaaccctgagaggtggcaggtctggcggtgacagatgtctcctgggcgtgcttgggcacagcagtttcttacagagatgctattgatccaaacctgtgttttccaaagctgctaaccctcctgtacctattctctgcacatggttgttggaagatggaaatatgttcagaaggagaaaaaacagagagaatcacaaggggattcaggaggcattgactgaagatttattttttgcattgtggaaactgtggctgacagcttgaagttccttggcccaagttataggattataaaatgattagccagctatgattaagcaatttgcatatggaaaatgctaccatcaactacactgagtcagcaaacatctattaagtgcctgctgtgtggtgggagaaacaaggactaggaggatgtggtccagcaggatgtgaattgaagaggtctgcgtctattaatgtgaggtgtggcagcccagaggagagagcatgtagttcttctttgggagtttggatgagggtttacagatatggcttcccttactgaagcatgggttagagatggcaattggagagtgacatgtaggcagtggtaagttatagttccttttgtgcctggagcaggagagtgtgatggagagaggtggacccagagccagccaaggaagtctcaggtgagatgatgtccttctgctatgcacgtttgctggacttttcagcattggaattggcgtcagtaggcccagggtcttgttttggctgtcccactgactgtgtgatcttggacaagccctttcttctctggagacaagctagaaggtctccaaagacctttcaactctgaaattctattgagtttatggattggatgaatacataatgaacaaccagatgaattctcctggtgaattttttccagatgaaatcggccaccctcctcttcacggttttccagtgtcctcatctggctggctcatccctgcagtgccctcagctgtccagatcccccagagtgggggagcacccctgtcttctgagctgtcttgatctctcaccacccccttacccagaagtatctgtcctgtgtcctcacctgctccgtagagccctgacaaatgacagggcaatctgaaaatccagttcgtgccaaggtgctaatgtccatgacaacattaaattcttttggattgttgagagcatctaactaaatctcatccttctacagttgagtaaacagaactgaagagggaaagtgacttggccaggctctcacagtgagtcaggagtagagagaggaggtctcctcactcacacagttcacacattccctagatcagcattaactgagcacttactgtgctgtgtgctggggatacaatgaagaataaaattctgattttccaggaggtcagactagaggggaagaagaacacaagcagattatcataaatcagtgggttcaataaagtgatgaagatatgcacagggtattagggggccatcaaaggaaggcctccagactagcctggcaggttcatcaaaagcttcctggaataggccaatccaaagggccttggagaatcaatgggagttagtcaggtagagaaggacattctaagtgggggatacacacagttaatggctcatgcatcccagacatttgctttttagctaaggccttaaccaaggaagcagattgcatgagaaattgtggagcttgtaaggaaggtattttggaggtggggagaacctttcagaactttcatattactccccatggacagccaacttactatcctatgtaaggcaggggaagaggaaaggcatattcccaagtggacctgagttagcacctttagcttggtggtggcttgtcacaaatgcctgtcccaggctaaatatcataaaatcccagacccagggattaccacttggatagctgtcaataggtgtccctcttccagggaatgggccctactggcctaaaaagagaatggaaaccagagcttccctagggcaggagcagggagattaggccagtcctaaagatggcatagccttggttcgcttccagtgccagctaggaataagtatctgaaaggtgaactttattctgccaacactggagtgcatccctgttcctgaccctggaagccttctcaccctgagatccaagtcatgagaaactccctcctggaggaggaatgctgcagggaggatggctgggcagccgttgagggggcaggggatgtagtaggcacaggtacagactgactctaagatgctatgtgccattgacgaactacatccagagctccaggagaccccaggtgggcagggcttacctcctatgctctgttcacctttctttttgtcagcatttataggtggccgctctttcctcagtacttctgactttccctctccttatgctaacagtacctagcgcaggctctggttcagggggcatttgaatcaagccactgccttacttggctggtgggtatgtggctgttcacccattcctgttgggctaggggaagaggaaaaagtggtatcagagaagggacccttcccttggcaagctcaggtgatcagaagaatcaccccaagctgcatgggaactttccccaagagtaccccaatattaggctgttctatttgggtcccttcatctgctctccacccacagcaagagttggtctcagctgggactgatgaatcagtatatccaggggggaaatgaggcattattgtcagttatcctggaagaatagccagacactgtaccctggggatgcaggatcactaaaaatgaaaattaaccaattaggtctttatcccacccagagctagggtaggggaggaggagccagcccctgggcctttcagtgagatctggttatccaaggtgaggcaggagttgccagataccctcaattcctaaccgagggggacagggggtgtgagaacagaatggatattgccaggaagtcaatagaaactgaagaagcattcaacaggggatgttgagaccctggtggaggtaaagaaactcttctttgcttcggaggaaccaattatcagacaacccctttgctgatgtttgacaaatagcatgacagggaagataagtcccacggggctcccagagctgagtttgagatacttgtgtagcatccatttaataaaaattgaaacgcattgcttgtatctgcccccaacgcgcgcacacacacacacacacacatttctatgcccatgtgccttggtgagtgggtgcatcagactgtgcatataaaatacatcaaactgaaataagaacaagaccctggagactactgtggttcaatatctctggacacataatggaaatgctcccctttgactgcccaggccttctatctaatagagctttgggagaaaaggaagctgccttgaccctctatcacaaagttgttaaagattcagaagttgcattaatttaatgagagatgcctcggccttccgtctactgatccaacaatttccaattattcacaatcaagagagtctaataataaaaatctacccatttcccaaagctggtattctcacaataggcgctgctggctcttgagtaccagcaatgtaccagatgccatgcccagcaccttctactcaagatctttaaccctcaaaataacactgcaaagtgggtgttccaattctacacagtatgaaagtgaggctcagagatgttcaagggtcttcactcaataagtggcagatgtgagaatctgctttttacctcccagtctacatcttgtacttgtcaaactgatctttttggcttttctgtgctctattggtttctattgttgtgtgacaaattaccacaaagttagcaccttaaaacaggagcatttattagtgcaaagtcatataggtcagaagtccagcatggcatgactggctctttgctcaggctgaaatctaagtgtcaccaactacattttcatctggagcacaaggtccccctgcaagttcattcctgtggttggcagaatctacttccttgtggttataggaatgaaatctgttttcttgctggctcttggctagggacagcctagcctcaagagaccattcttgggtcctttccccatgactgctccatctcatcaacagggaacctccctgtagtccagtttctctcttagttcatatctccttggcttcctcttctgcaaacagccagtgaaaactctttgcttttaaaggactcttaggccaggctcatctggataatctccttctttgaaggcaactgcgtcatatagcgtaacctaattgagaggtaaaattcatcgtagtcacagtcctggggagtgtgtgtgtgtgtttgtgtgatgtgtgtttcttgggggtcatcttagaatcctgcctaccacacatgccaactgtgtaaattagtttattttcttttcctttctcctctaccatctggtgaaatggtatacaaggagagatctggggccagggcaccaggaggagagtgctggagacacttgaggcaggaaatccatacatcccttgatcatgcaaatgataaactctgtgttgtctctgctgaagcaaggcagagctcagggcagggcccatcccttgcctcctgatgatggcctgtaaaccagcccctgagggaaaactgacagccaaggcaaagggggaaaccaaggcctctctcttgaaactgctgtggctagcagggaggctggtggccctgaggaatttgggccctgctgagaagagtgtttgagatttaatgaatgtttggaaagcagaaggagactgaaaataaaaggcattatggcaaatcacattattattattattattattattattattattattattacattataagtgctattgtattacaagcaccattaggagtagcaattgctgttattattaagcaatccagcttctccatcctcagcatcaggcttcactccatgtcaaaggcgtcaacagctccgtaaatcaccatctggggcttccctcacattcatagcccagtggcaagcctgatgcctgcccatcccactgaagcctccagccatagctcatgtggtagacgcatctcctgtgaattccaaagctggatttttatcttggccaagagttgagatagtcctaaacccattcctgatcatattgctctcttgcttaaaacccttcagtggctgtctccccattaccctcaggataaagtctgaactccttaacataactcctgtgacctcctattccctatcacccactgcaccccccagccatactgaatgacttgcaggtccctgaatctgttataagctcttgctgttctggggctctgcacatgctgtggtttctctgttcgtgaaactcctcttcccacctctttatctggctgactcctgctcagctttcaggtctcaacttgcagtcagctctcagctcaggaatatcagcagcaattctggtagaaaagaccaccttatacgtgccatgccgtgtaattaactactcttcaggacttaccttccacctgctactaagtttaagcatcttgaggacaggcatggagtgtgcttatcattctatttctagtgcccaacatgttgtgtgttctcaaggagacactcatgtttttgttgaatgaatgaaggaatgagtgagactaactaagatctaaaaagtgtccaagagctgaaaatctgttatgcatatccctgcccctcccccgcccccactgtgggaacctatctgagagcctggtggcctctggaacacagcagagtcagcaagatgctcagtccttgtggagaacccattatttgatcctgctgccaatgtggagcacataaattagtaaggaggcagagtccactgattaacagcatcgctcatcttcctaaacaactccttgtacccctggtgggatggtggagctgggggtgcctgggatctctacgtgcctgaggctaatgtgttgggacctgggaaaggagaggtttagcaactgatgtatagacaggaggcctgaccagtgaatgctgatcagtgcctgaagaaggaagcaagcctgcagaaaagcggtagctcactgcagcctaaggggagagcccgaggtgtccactagttctcattgtcaacttgacttactgaggcttcagctacacagttaaccacacagttaataactacttatttagcacctagagacccagaacagtgttgtaaataaaaaaatgaagacagacccagctgctgctgaggaggtaagagggctttccacctggcctctgccttcctcttcctggaagcatatgactgaggtctttgtaaaggcagttctaccctgatgggtgtttgcaggtgaacatgaattaatttaatgaatgtgtattgagcacttgctaagcgcaagtgtaggatatagtgaaggggatagagcatgaacaagaaggaatatggtctgcctttgaagtcctgtttgtggactcatgttgggaaagaagagcagagaaaggacagagttcctgggaggaagggatgtgcatgtccaggttatggggtaaatgaataggaaacatgcagggagaagaatccaaagctgggagatttaggaccaaatctcctattaaatagaattcattgacaggtgtgaattagcctcccagctgctactgtcttcaaagacctacaacacaaaaagccatctcccagcctacacagagagcacaggctttgatgcagataaatagacagacgggtaccgcagtcaagtgggctcaggagggaaggagaggatgtaagggtgcccaggagattttggacttctggtggctccagggctttcctgcaaaaaggctaagagaggacttctgagacaagggtctggggcctggcttctgtgatgcattagatctagctatgaagaagagccttgggcaggtgaaaggaccaggctgccaatggggtgagatgaggcacagcctgacaagtgctgccttcctaaatgtttttagtcaacagccttgacttctttctatatggggtgcaccagagtgaacactgataatgtaagtgcatttctttcaaatggcatctagtccttggagaggtagctttgaacaaactcgtgataaaaagctccaagtgatgacaggtatgtagatgaggtgtaaagggggcatgattgagtggccgcttcttccaggcttgggagatgcaggaggtcaaggtggacactgaggaaaaggtaggcaggaatcatagcatgaaaagacttgtgtgtctagccaaggggtttctgtcctgtattcagtaaaggagtattcggtgagggggaagttcatgatcaaatgtggagtttaaaaagatctctccagcaataacatggagaaggaacttggagaagtgcaagactaaaggaggagaaaccaatgagtccgtagtctaggaccaagctggtgaggatctgatttgagttagagatgatggggtggagggcagggatcagattcaagagatgtaaaggaattataatgtcctcaaatgacaataaatgagtgcatacctgcttacatgaatgaatgaatgagatgtggacagtgagagcatggaaggggaggatgcattctaaattctagcttgattgacaggtggatcatgtgacattcacaaacagggaaccaagggagggaagcagatccaagtggcaagataaggagttcaagttaaagagcgatacggtcttaaggatatcttcctccttttcagcttcataataatattttaagaaattagaatcgtttagtgtttcaggactcctggggtgagaacatttgaagttgtcaatcattaacaatcacagtgatggagtatgctttgacaccacctcctagtggcctagcccagtgctgagcacacagtagggaagatagaataatcactggtcttatttgccaaggacctggatcttaattccatgtctgtcttaggggcaagacatttaactcctgggcacctcagtttgctcttctaccacatgtgaaaatgaataaaacctgttctgttcacttccaattgtggtcgggagccccaaaagcagtgcatgaaagtgccctgtaagcttcattcagccacatccgtggaagcagttgatgttattatactcagtaataaattgatatttcataaatcactttgatgtgggtgacatgaggctgccagcctcctctcccaggcagttagggtccagggctgagcatggagcagagaggatcagaggctgaggcttgggtgaaagcaggcaagaaatgagggactgcttgaaaccccactgttaagggggttaaggattttaaacaccactgttaggaagcagagccagttctggagtgaagaggctgcaaatagggccagttataacccaaatgggtgcaagcgttaacacttggagagatttcagaggtcacagaggtgttggagtgacaccttttataggttgcctgtggccctgctgggaagggagctgttaaggttcttggactacctggggctgagggctttatgcagacgccggagacagccagccacctttgtggcgtgatctggtgggcttcaggaaggcctccgcacactgccttcctcactacctgctaatgatccctgaaagtgcatgaaacatgcattccttgagctattctattattacttctaataatactaataaggagtctgtatcatacttccagtctgcacagagctctcctatgtattatcttttttgagtctcacaatggcacagtgaagtcttatttcccccattttaaaatgaggaaacttttctgattaaaaaagagaaaaataaagaaattaaaagatttttttttaaagattggtttttggaatgtgggctttcagagaggaacatctaggtcaaaatacccaaagacagtgtatgatttaaaatgcggtgactccaaacccatacccactctctccaggacagttattctcctaaccatttaattaagcccaaaaggcaacttttgatttcactgatttttctaggtgccagggacacagcagtgagtgagacagtctattctaccttccaggagttcacaggccagcggggaagcatttgaggctcaaataatgatgaccgtggagagattttactaggggcggctgaggctgctggacagctctcagcagaagttggccaagttcaccaagctgcattcgactgcctgtttctctgagccatcttagccacacaagcctgcagttatactgcattgacttctaattccttcccacctgctgcaccctggtacttgctgtgactccttttctgggttcttcatgctgaacagatgcgatgtgaggcaaacctcagctctctcatgttctcagtgaagtgctcagttttgcctggcgcacagttggtggtcagtaaattgtagtagttattattagaattattgctttcttgtgattattcatggttggaagatctggaacttcaactaaaggcttctctctcaacacaaatagccagaccaagcaattagcatcttatggtgactttttttttttttttcgagacagagtctctgttgcccaggctggagtgcagtggcaccatcttggctcactgcgactctgcctcctgggttcaagcgattatcctgcctcagactcccaagtagctgggactacaggcagatgccacacaaccacgcccagctaatttttgtatttttagtagagatggggtttcaccatattggccaggctggtcccggactcctgactccaggtaatgccccggccttggcctcgcaaaatgctgggattataggcgtgagccaccgcgcccggcctatggtgacttatttagcaaaacttttcccatttgacaagtagctaagagtcacctcttgccaaacaaagaggaagagaaagaggaaggcgaagcctccaggccagatctttccttttggcagggcccagcagttcagggggaccaggaaaaggaaggagattggggcagtgcacccactttggtgacaccggcagcacggaggatggattgcacttggacagaagaggactcccaggccatgagtacctgtgtgccaggcacttctcatggattacctgtgcaaggtagatgctcttacccgcactttacaggtgaacacatcgaaagttcagagatccgcctgaaatcagccagccagtatgtggccaaatgagggtttgaaaccaggactgtcttatttcaaaacttgtgctctttctaatacatgctactgtttcctgatgagattgccacattgcacaatgtggcaccaaggggcaccattcacatggtcatcagtataaatggcacctgggaattgaacagcatagtggctaggtatcctaagatcagaggcacgatctccattaaatagcagctattgcagaggagaaatgacgaggacctaacctggaggggttggaaaggaagggacaacttcgagagacatttaagagatagatttgacagaattggcagttgactgggtgtggagttaagaaataagggagttgaggctgtctctgaagtttctagcttaggtgcctgggagaatagtaatgcccttattggttaggaaggcaaaggggaaggggctgttgggcagaaaacatcacggaatgccacttcccctgcttacccatttgacctgggttaggagatgaacttgatttaagggtaccacctggacctgtgctttggtttcttgcttttctacttaaggtcaaactcagaaacaatctgggccattaaaagttcttgtgcttttagctgtagttgactaacctggtcctgtcctcaggattgactaaatcccacccccagtgatgggacttgcctgcttagcccagctgaacatgtccccggggccctgcttcccctagacctcccttgcagaagctgcccacaaggtctgcccaacctttcccttatccctccatgttcccagacaccagacactaaagctctacatttcttggcactggaccctgtgtggtataaggcatggtcggccccttgcagccatggtaatctcacagtttcccagaccctctcttcctctcatcctccaacaaaactacctgagctctaggacctccacctgtctggggccatgcccaactcagcccccactcagagcctgtccttgctccctggcccaggcgatgaacaggctgtagacccataaagcttcctgcagcttgcagtgaatggatgcctgtttgtaaaccaggacattggacatggcacgtctgctgcagaaagtgaggggcgcccttccacgtagctctcaagccattatccgtgaagcattccttcatctcagggtaacatctgcccgtatccacttgtggctctgacctgaccttcaactatagctatttggacccttacataccattgtatacacaaagatttgcacacatgtatgcacacatgcacacacacacacacacacacacacacacttttaaaaatgtttttcatgtgaaagcccagtgatgataaagcaagctgtcaggatttaaaaaaaaaatacaataatgcaattcacagaggacagtcagtggttagcacagcttctactcatgtttttacaccttctggaggtgtgacagggtgtgcttggtgttagagttggccacagtgagaccccaaggcattaagatgtcttcaatcaactgtcctcaaaacagcgttgaccaaacagcttttaggtaccaagcactctctagatgcagtgtgaacttcaaaaatgaggcagacatatctttgcttcctggaaacacacagccccctgtagagagagaccacatgtgtgaacaaacaatgcaacatggggtccatcacaaagccacccacacttggagtagtggaagacctggtcctggtctctgccccaccacttggctttaccaggtcccatttgctctgttcttcaccctcattccctggtttgggacaatgggagtcgattcctgttgggagcagggaccctcaggatatcccttcctgggatatttataagaagaggatcaaggtccccatgagaacctgttccacccgagggactgttcctttctgtcattgtatgaaggttacaaccagccaggcagtgtggctggggcggggttggggaggcataatgggagcctaagtgagccaggtgtgcattcttaggtagggctcaagatgggtgggcagcggaaactgggtgaactttaatcccttccattcctgaaatgtgttcgttttatgaaatatctctctccgcaaaatgtctccaccacttgactttggatttctaagaaatgtttctctgaatagatgtagagtagcatttcccagattgcgttctgaagcacgccactgccaggcactcatggattttggaggagaaaaaaaaacccatagtcctgctttgttccatggtcagtgtgtttgggaagttcagggttaaacaaaattaaaccagctgcttcactgctggactcttttcagcctttaatatgctagtgattattacgaatcttgaaaaggcagatataatatgcattgttttccagccttatctgagcatggaaccttgtcttcatgaaatttctgttggtgtcacctggaaacctaatgccctgaggaacacactttgataaatactggcacataagatgttcattgtttgtaaactaacggtggtcagttatttcccatattcttttagacaatagtcttcaatagcagcaggaaagtcttaagtttagataaaaaggagaatttcctaactgtaaggattcttagatactagaaccttagagtgtcgtgggaaatggcagtaaaagaatgtgcccctcccccttccttgtccttccacaggctatcccatgagtcattataaatagaatgaattatcaaggaagcttctggaatctttttatcttaagaggcctttgaaagttgcatagaattgtgggacaagaaggtaggaataaaaaggcaggaagacagactggctgacttctgggtagactgtctctaagtgtctgtaattaactcattcattcttactccgcccagaacatgcatttgaagggaatacctttctaacttgtggaactgaagaggcagaaagccagaagctaccccagatttcacggtggtctttcagtagctgtcgtatttgccaaataggaggctaagctttacatgcatcttacttgtttcttgaaataacctataaggttgctaatattgtttctttttaaaaaacaaggatctgaagcccagaaggttacagaccttgccgaaagtcaaacagccagtatggtaaggaacctggatttgaacaccaaagcctgaatccactatatcaccccagctgccactgtgaatctgtggacatccagagcctcagggcttccttaaaatgagccttcatccatcgggctctgtgtgtggggagaggatggagttgggctgatgtgtctgcccacaatgataaggaagccagggaagaggacattttccagcccctgccaaccatgcccagccaggccccttggtttgcccacaacagtctggctctgccccagtccctgcacccttgccaaatgcatcttcttccattagccatctgcccccttgtgcctaccgatagcccacagcacatgggcagctgccctgttagagagataggagataatatcagtgtaggaatcaatacattctctggcatgtcctttttcccctaatgggaatgtggcaggatccaaaatacacttaaaccttatccaaatccactctgtcaggcattggtggcttcaaaggaagcttggtacctccagtttgcacgtgtaagctaatgaagccgggctctgggtaggtgagctgaggcctgtaacctgaggccttggcagtgtctggagctgtgtggcaaggatgcaagggtggcgccaggggcctacagcagctaagtcttcagaagaggagactgcctggaggaaagcaatctttcttcctggccagaaggaaagcctaaggcacttgccatctgtcatgtcaggctgagtggctgacgggctagtcctagggtctggaagtcctgtgtacccccagggtgtggatctgtgtgcaaggcacttggaatgaacatgaaatgaatgtgatttttgtgtgaaaaggtggcctgacgcacatttgaaggcatctttccgggagcggggatcagtgagctgaataatctacaccctcttgactggtttcgctgtacagggcccagggagaccttgggggccagggctcagagctcagaggaggacactgcccctctctataacactaactggcctcggtgcactcacacctgcaggctaacacgtggccccaccagcgttattgcatgaggaccatgggttgcagggagaactcctttgagcttctaaatgtcactgcctttagatgggatttccctgactgcgtcatctaaagtagcagtccctcaccccaagtcccatccccatagctatatgaaatgacgatgaatttgtttccttactatctgtctcttccactaactgcaagcttcctgagggcaacaagtgtgtctctctcatccatatcctccatgcctagaaccatgtctggcacatgataaatgcttaaatgtgtatcaagtgaatgaaaaaattagtggtaaatgaaggcaccaccctacccgcaaaccttcaggttgaggttcttagaaagcaaacttggttttggcattcctccactgacagttcccctgggtcccatcacacataggacaaagggcacattcccaagcctggcatcctgactcttatggtctggtctctgctgactgccccagcttcgtttctcaccatccctctcccaggcccccttgtatccagtgtgctaacccacacttcaggtgtataagacttagggtcctgctggaaatgcaagctcctgggcctcagctccccagattcggattcaggtagtgttaggtagggttcagaaatcatcctcttttttttttttttttttttttttttttttttgagacagagctttgctcttcttgcccaggctggagtgcaatggcacaatctcggctcactgcaacctccgcctcctgggttcaagcgattctcctgcctcaccctcccaagtagctgggattacaggaatgcaccaccacatccggctagttttgtatttttagtagagatggggtttcaccatgttggtcagtctggtcttgaactcctgacctcaagtgatccatccttctcggcctcccaaagtgctgggattatgagcgtgagccactgcacccggccctatcattttttaaaaaggaacctggatgatgctgatggtagaatcacactttaagaagtgatgtcttcatcaaagtacaagcacaccatgggcagttcactgaaagggccatgcactttctcagctctgccctatacatggggatttctggctggaggagcctttgaccactcacaattctccacccagaaaatgcctatgtatccttcaagacacagttcaagcatcccacctcccgtggaaaaaaccctgtgtgcctagtgctgcccccactaggcacatggcttttttctttctctctctagctagtgcatcttgtatataacttgtgtagagatcattctgctattttttttctcctccatcctccaccatcacagtgttaactcccagaaaaactgctctcattaactctggacccctaggtcccaacagagtgtctggtgttcactggactagaatgtggtacccagatatgctttaccaaagtccatccctcacttcaccccttcctaactacattcttatttctgatgctgggtctttccaggagttctcactccagagaatggacagccttgtggatgatcgtgtcaacatcctgggattttccattttcaaccaatcccatgctttcttccaagagtttgcccagagcctcaaccagtcctggcaggagaactgtgaccatgtgcccttcactgggcctgcggtaagtacccgccagagctcttcctggtgccccttggcctctgcacattgcccctctgtgggccaacccctgggcaacacatcttcttggagtccagccgtctcctgctccagtcccagctcagaaagggaggtagagaggtgtgggaagtggttgcagggtatgaggtttgggaagcaatgagctgtagacagcagggagggggctgtgtagaggcactgagttgtcacttagtgatggctgcaagtcccctgtggccagactctcaataatacaattgccgagagctgcctgagtttaggatccaagaatcggttggaagggcctttaagctgatctgctccctcatttttcagataaggaaactaaagcccagactggaatgggatgtggagtggggatgtgggggtcttgttcaagggcaaacatcgaggctgttgcagagtggaactagaccccaggaatcctggctcctggtctggtgctctgtccaccccctggccacttcctgcgtcacggctcatccagaatggctcccttctgcccagtccctctgcttcctctctgcagttctggccccttccggcatgtgtgacgggagcaaacctttccatggccattctccactgagttggatgttcttctccgtggggcaggccaagaatatctgcttgtgtacatttgttaaaaggcaagttctcaggagactaggattatgtggctttttatgccctgtcctagccccattatacacaatattttatttttaaaagccccatgaggcagcccttgtgatgctaactccaacttcctgaggcagctactatcagtatctccatttcacagatgataaaaccgaagcccagaaaggttaggcaaatagcccagggtcacatagccagtgagcagaggaccaggatcagaacccaggccgtatggctttacagtttatatttttaacctctgttccactgtgcatctctctaggactgtcatttccttgccacgctgtactgtaattgagcctggctagatggaagtacagtgatacatgcgtaatgacattttggtcagcgatggacaacttatatgatggtggtcccatagatgataataccacatttttcttgtcccttttctatgtttgggtatgtttagatatgcaaatacttaccactgtgttgctgttaactacattattcagtacagtcacataccgtacaggtttgtagcctaggagcactacactataccatatagcctaggagtgtagtaggctatagcatctatatttgtgtaagcacacactgtgatggtcacacaatgaagaaattgcctgatgatgcatttctcatcatgtgtccccattgttaagcaacacatgactgtagttactaggtatttgttgaatgaatgagtgagtgagtgagtcaggcggaatgatgagttacagatagaaagaagtggaaaagcattaggtctaggagatggcaatggaattgggtacactcctggagtgggaaattctctggtgagtttttaaaataggagcgatgcctgtctctgataagacatgcccagaggcaaagtcatatctagacatctatacacttggcatctaattagtacttggccaacacggtgaccttggaggtggcctgcggaagccagggcctggacttaatgacctttcacaaaactctgtgcttttatgatcatgcagcctcgtggacatctcaggaaggaaggggtagctaaggaggtcagagctcatggaaaactcaggaagctttgatccagggagtgggacagaaggagcgggtttgagaaagagtttcatgcaggtttatggaacccatcccaacaagatattttagacctaaaagaggcaaaaatccatgggaaggactgggaagggcagctgaaggaaggagtcatgtccattaaatggtttaagggacagagagggacatctcaaagcacagtgtcatgtgcaggatcagactcaacccctagcagcaatgcaagccctgttctcccagctgcgtctgctgttcttacagttctcattccagtatttttatttttatttatttatttatttatttatttatttatttatttatttatttttgagatggagtcttgctctttcgcccaggctggagtgcagtggcgcgatctcggctcactgcaagctccacctcccgggttcacgccattctcctgcctcagcctccggagtagctgggactacaggtgcccgccaccgtgcctggctaattttttgtatttttagtagagatggggtttcaccgtgttagccaggagtgtctcgatctcctgacttcgtgatccgcccgcctcggcctcccaaagtgctgggattacaggcgtgagccatcattccagtattttaataggtgctgacaaacttgaaaggcttgcagtacaatatcaagaaaggagaaaaaaacatctgtctctttcccttcaacccaagcctcaccacatttggcatctggcctagtgaagtaaatggtcccaggctctatttcctcattctctctaagggtatcttcctttgcattgatgctcacattggccacgagcagacagatgagggtccttcggttcctagtgggcttctttgtaaggatccagcacaaaggccaggagtgcctttcacagagctgtgggtcagcgctgccatggtcagacaggctgaaaaggccactggccttggagtcacagagcctggagtcaaatactggccttgacattttctcaccgtgtgatctgaggtagtgacgtaacccccgtgggccgcagattctttttccataactttaggtgaattatacctgaccatcttagagcattattgtgaagacggaatcagatacgattctatttccaattcacaatcattcactaagttaatataacaacctatatatgccagatgctggaataggcattactaaatatatcaggtagcttttgctacataaatactgtgtaacagccaactcctaaatctcatgatacacaataaatatgcatatacgattctatctccaattcacaatcattcactaagttaatataacaacctatatatgccagatgctggaataggcattatcaaatatatcaggtagcttttgctatgtaaatactgtgtaacagccaactcctaaatctcatgatacacaataaatatgcatacaatacacatttatgtagcccgcggacctgtgggtcagcgagggagcagcttgtctaagctggctcagttgggcagctctgctgctctgtctgagatctctcagcatgcaagggttggctaatccagactgggcctacttggggccagtacctctcactcttcccctggaccagcaggccagcccagcatattcttatggtgatggcagaagggcagcaaagcaagtggaaacgcaaagacctcttagtcctaggctcccagaaaggcacactctcattttcttggccaaagaaaggcacacacacaaactcagtgttagggagtgaggaaatgtactctcccttttagaggaaaaaaaatgcaaaggcacatggtaaaaagtctgaatacccgaatacagagtgtgtcttagaccatttgtattgccatcaaggaatactcgaggttgggtgatttgtgaagaaaataggtttatttggttcctggttctgcaagctgtacaagaagcatggtgccggtatctgtttctgatgagggcctcaggacgcttccattcttggtggaaggcaaggggagggggcgtatgcagctcacatggcaagagagaaagcaaaagagagaggggaagaggtgccaggctcttttcaacagccagttcttgtgggaactggagtgaaacttcactcactcctgtgagaatggcacaaagccatttgtgaagcatccaccccctttatccaacccacccgggtcactgccacatgagacttgggaccaaacaaaccatggcagagtgggatgaaggattggctccatcacatagtcacacagtgaagatcaaagccgctgttatccggatgcgccatgcaggagcagggttcacctccacctctgggaaggtgactcctcggcatatgttactctcatggaagcggaggaaagcccctgagttcttcctgcagaggtcggggaaggcttgcccgaaaagagggaagccagtaattcaccgctcttctgtgtgcaaagcaccaggcagggtccacagcatcccaatggagcaggggtcccgtgctgacttgctcagtggactggagagggtgtcctgtcctgaggatgccacccagggctgtttaaaagatagaaaccctgacctcgtttgtctccttcccagtccaatgtcagacctcccaaggcctcagcatcttatgctccccaagaatgcttgggggatattcagtgagtgggggtgttctctgaggctctcttggtgctgccggcggagaacaagagtaaagatgggctgagctgcaccggctcaaggctgtctcagggaaccatgcgaggagcatccatgtgggcctcaggactgcagctggtccttgtgctgatcagattctgcgtctactttagtcagctttctctcagccaagcccctttggttttcttgccaataaaatggacgagtgttctttcttgctgaggacggcagggctcccaccccactgggtttcacctcggcacagagctgaagactcctgtagcccttcccatgaaattatcctgccttctcctattttccttctcagggcatcctcgtaacagttaagagtggtcatgtagcccttttggacaagtggggaaactgaggcacggacgtgctggatggcacatcaagggtcctctgaggtcagcactccaatataacctggagtagaacgtacatctgtctcccagtgccagagaaccttccagctactgtctctgtggcctccgagagggaagggaaggtgttgcggactctctcacctcagcgtgtggaaaggaagctcacggcagcgacaatagcaacacacctctctcaaggcttctcactttagcaaccagcttttgaaaagtggtgcctcttcctgtctctttgggggctgagaaattcacagcacaaacagcccagctcttttatgttctgggtagctggaaggcgagagggagtcagttccaggaaaaaagcctggttctgtccccaccatcaagcgttctacaaaagctgcagctccagcctcatggggacgttctctctttctctccctcttctccccttctttacccttttctccgtaaccttcttttctgtttctctctctccacacgatgttccctgctctttcttcactcttggcactttcttctctccattgcctttttctcctgacttgggtaagggtctgccgctcttcctcaccttccgggtcgggccttcggcattctaagtggagctttctggagagggagccccgttctaagggcactgagagaggagtggctgaactgagaggtaaccaggaaagcaagatcagtccatgcccccaggccatacctgccaggtggccgacaggagatgcaaatgtgcttctacctgagacaatgcaagcagaagaagggatgtcgcaaatggagacacacacccgctagcttcacacgccgttcccattaatcacgctgcaaagaacaaaaatcctggaaaatcattaaaattacagatggctagattaagtaattagaatttaggctaaagcagatgtttgtaattaagtgtttatttcattgaataaaatccagattgtaagaactattccatgggattttaatggttcctgtcctggtattatattggggggtagagtttaagctgcagaagttcagagacaaatgggcatctgggaggatcctgggaatcccgtcatctggggcatggagagagatgagggttacaggtgtgtatgtaggagatattcttattttcatgtcatgggagggggaaggaactcagccacagctccctgagtcagaactgattcatcttaatttatacagagccttgcattcccctaaacaatttgcaaacagctcaaaagaaaataacaatgaagaaccaaatgaaaatataaaaacaagagaatcgagggttcattgccaagcaacgttttggggccaagaaagaggagaggattttaaatgaggattgagccatttggggtatttaatatttagaagagacagggacaggagaagcagagacaaaagcgagaggcgtgcacacacagatgaggagtagaggccatggaaagacagaaaggaaaaggaaatgtattgagagagcagagaaggggtggaaatgggggggggggcggtgcctccttcccctgatgagcccagaagtggagacatggatggagggctttttttttttgagacggagtcttgctcgcccaggctggagtgcagtggcacaatctcggctcactgcaacctctgcctcctgggttcaagcaattctcctgcctcagcctcccaagtagctgggagtacaggcatgtgccaccatgcccagctatttttttttttgtatttttagtagagatggggtttcaccgtgttggccaggatggtctcgatctcctgacctcgtgatctgctcgcctcggcttcccaaagtgctgagattattataggcgtgagccactgtgtccggccaggagggcttttgtaacagaaactgcttctccctgactgtagccccaaatgctttccagagctaaatgagtaagtaatagcggagggaaaaaacaattaggagagggagaaagatgctttgggatggagatctgaaacaaggtggaaaaattgatgaggcagagagatgacaggctcgcacgccatcagaggagaaattcggtgagggcaggagattggtgactgtgaggagagagctgcaggcacaagggttgggaggtgaattctcagagcagtttgaaggatccaggtgagaagcgtgggcagattggcaggagcctgcagaagacagtgcctggtgatgggtggaggaacccgaggagactgcagcgggggagaagacgtttggggtttagaaagggtcagctctgaccagcccaggctgaaccacagagaggaactgtgaagcccagagcctacgggggacacgtcagtggtttcacccctctgaaggccacacacaggtggagaggagaccacaaccttgaggattttccttctacctgctccctgtgcccagcatccctagctggcattagtactagaagcactcgaagaatcttgaaggccatggaattagagatgccaaagaacattgccaacaggcatgcacggatctcagcatccacatcatgtgctaataagagagcatcagccaagaaaaccatgtcccagacggagtgggaatagtggcaaccgtgtggcaggaaccagctgggggcctggtgggaggatgtgagaaatggcgtggtgcttcctctgcaaatctgccgtgatgacggtctcttggggaccagcacacagcctcactggaggaagagggggcctggggagggggcctgtagacactggggactggtgcaacaatgcctctgagaggaaagggatccccagggccttggtaccagagtactctcggcaacagaaaccctgtatcaaaacgtcttgtgagaaaacggaaatgtgttattgcgtggcttagcaagattccggagtggtgaggttggaggccaaatcttttccatctctgctgtgtccccacttggttacagcttcatgctcaggctggagctgggctggctgcagcagtccaagcatcccaaccagacacagacatgtccagaggagagaggagcgtccttttaggagacaggaaactttcctgagaagcaagcccctcattccaggcctcagttcatggctcattgtttcagtggggtcactcacactgtcccaaatcacatattggcatggggaccttggaccacccaggattccctgggacctggggctgactcagcctcctctgaagctccttacagtttgggacagggaaggatacctaaatcaaatgggaggaagaaggggagaatgggtgctaggtaggcagccaatggctaatggctgttaactgaggggctaacgtgaggacaaacaaccagtctttccaggaggcaaactgggtgatggccccaacatagggcattagagaagcctgcccaccatcccttcctgcccccaccccggtgccagagtcccatgctcccatctgctgcagagaaggcaacaatgaaagattgccccaagttgtcctgggagatgaggcataagaataaatctgatagagcaatgacaacctaggcttctcggagggagggaggtggaagacagtgctgtggagaggggaggaagccagtctggacaaagggtactgggcctccaggccttgctttgtgaccttgggcaagagaagaatgccttgtgcctcagtttcttcattcgtgaaagaagacagatgagtggttttttttttttttggttttgtttgtttgttttctgagatggagtcttactctgttgcccaggctggagtgcagtggtgcaatcttggctcactgcagccgccgcctcccaggttcaagcgattctcctgcctcagcctcccgagtagctgggattacaggcgcacacaaccacacccagttgatttttgtatttatactagagatggggtttcaccgtgttggcaagggtggtctcgaacctctgacctcaaagtgatccacctgcctcggcctcccaaagggttgggattacaggcatgagccactgcgcccggccggatgagttgtcttctagaatttcttccagctcaatcactccacgattttgggaatctgagaatggtgagattaactgggaggcaagggagaaggtgggacagaaattggtttatagcatcatttaaatagccaaacagaaggatctagaagccagtttcagttggggcagctaacttgctgtcaatttgtctaagccggaaagggagaatctgcagcattagtctgtggcatgtgagaggcccattaataaaagagccacatgtgctcaggggaaagcgagttacatggaaggacaaggacggttgtaggcttgcaaaggagcattcattaccatgcagggcgaatcaaatgaagaaggagctgagggcaaaggggaagagcagggaagcagagaagagagagtagaagatgatggatggagggactcgggagtgtggtggctcagcccacctcatcctagctcagcaagactgcagaggtgtgcactgttccccatggtgagaattgggtgtcctttgttgcttagtcttcgggttccaggaggctctgggaccaagggacagacaggaagggagttggagcaggggaggcaggagactcgacggaggccgagggcagtggcctgatccagtatctctgtggagagtgggaaggtgttgaggtctatggtacctgccagatggtagtggctgaataaaagtgggaataaagcaaagaagcaaggcaaggaggagaagcagcagcaagagagggagggagagagagagggaggaagaaagcatacaccagccaggtagttttgtgatgcgggtgaacttggactggaacagacaaactttgttgactgttttgctctgtaattgccttttaaagagattatccagagctggctcacccagttcccctcataggcctcctggcccaacatgtagcaaaactgggtaggaaataagcccatccaccctgcctgtagccccctgtccttaccactccctggagccttacttagttcagtcaacaccggcttcctgagcacctgctaacatctgtctggacctgagggggcacagcccctgccctcaggaatgctgtcttctgacgctggcagtttgcagagcacttttacagacttgtgaggcagggactgctgcttctcttttacaggtaacagaaattgttgctcacttggagggattcacatgcctgggatcactcagcacatagtgaggggctgggatctggactctggacttggtgttcatgcttttaagctctttcctcgacacctcactgtctcacactgcttacactctgcctggagagcttgaaaaaccccgagacagcatccctccatccaaccgtggaggggccggtgtcccagggctggctaggagggaggcaggctgtaagcagttggtcccctggaatggtggtctcacaagggtgctctcacaagggtctcatgtgggaccctcacaaggatgccatcagttgaaagaggaggctcggaaggggcaatgttgagtcgccagtgatggaatgtcgtgtttcagtgaaggaacttgccttgtaatgggactctgtgtggacttctagccctgtaacaccactcctcccaggaggcctccacctgccttcctggaccccctcagggccttggcacagtactgagtgtatagtcaattgcacttgctagggttttgtttgtttgtttgtttgtttgttttttgccagggaccccgcatacattaacatagtgtggtattatctcctccttagatggcacgttcctcaaggacaggtgtcttctgtctttccactcctaccacctccaccaagatacccagctttcccctccccacaggctgcaaacattgtatccacttattgggtagtgggcaaatttcagccagaagttaattcaagtcaagcaaatgtcttaggggccagccacacgacaggccccatgacagatgctgtgcagaatatagagattaaggtcctgtgtgttccctgccctgagaagcttgcattttaatagggaagatgaaaatgtgggcacacaactatgctgacctcttccctgactttcaggccccgcatggcaggacccctgccatgtgagtgatggattgcttcctccagccccgcccctcctctgccctcctctccttctaggagtggtccaactctccactttctagtctttgttcctgcagttccacgctctggaatgcctttccctcttctcagcgactccccatccttcagtgctcagttccaatgcagcatcctccatgaaagactttcttgattgcccaaccagatgtttccctctttggaaccctccccaggaagacctttgtggacctaccacactctgtctcatgttcctcttgtttgtgccctgtctcctcatacctcccttccccatcctgctgtaatcacaggaataggctcctactcatctttgggctttgaacttaccatgtgcttcatacctactcatcaagttgtacagtacaaagtggactaatattaggcacatttaggaagaaacaatatcgtggggtcttgtaggaggaagtgaccttcaactgagccttatagaatgggcagataggggggcagtggccaggttcctttctcttcttgacataagcagccgtgccctcttcttcaggattcctggtagcagtggcagttgcttgtttccctggagcagagagaaaagggtacacttgaagtcatgtggggcccaaagggccagcacaaggcttcaatcccagagaatcctttgccaccattgtgtgtcttgggtgaacacctgactattagatgaagtagagctggcccagagacaggacgtgggccaagggtgatgaagatgcactcttatttccctttcttttgctttctcttttcttcctccattcctcttattttctccctcccctccctttcttcctctacacctctcactccctccctccgcctgctccccggcctctcccagctctcctcggccctgctgtttgatgctgtctatgctgtggtgactgcggtgcaggaactgaaccggagccaagagatcggcgtgaagcccttgtcctgcggctcggcccagatctggcagcacggcaccagcctcatgaactacctgcgcatggtgaggagcggctgaggccctgcagggctgtgcccaggctagtggggtgggacacttggttcaaggtacaagagtccctcaactccaggcttgctcgaaatgtgtctgttattacagccccagataaatcagtgatctctggtgaccccagttgaatggatcatgagccacatttgttccctaaaccccaataaccactgagaattcatggaagtttgttcagaaggcaacagccctcgagccttacactattagtgggcccctgaattccagacttagcacctggcctctctgctcagcggtgttctcagcaaagctccacacagctgggaaagggtggtgctgctggagactggcatccctctgggagttgcaggctcaagacttctagcttggctgggtttcccattgttgtcctccccagccatgcttcctctggtgggtgaatgaggatctctaccctacacagaagacttctgtcagagaagcctgctgcagcacagtgtcttggactttgcatttagagttaggtggagagtcatcctgacttcctgtggacctgggggtgggtgagtgcctgcccggagaggatgaatgctgtggacagccaagggcctggaggaggggctgaggggaatctgagctcaagttagcaccatgactgggttggtttttgcagttggtatggggttattgggggagcattcttctcctactccaggccaagccaagtctgaattgtctccacagacatcacatttgtcatctcaagatgccttggctgtgtgtgggcaggagaaggatcttaactgctttgcctcttctgggcatccttaaatagcccctgtgtagaaatcttgcttgggggcaagtgtaacctggggcctgtttggtgctgtaactcactctctcttggacaggtagaattggaaggtcttaccggccacattgaattcaacagcaaaggccagaggtccaactacgctttgaaaatcttacagttcacaaggaatggttttcggcaggtaagcctagctgcaccgtggtgatggcaggtcctcctctctgttccatttcattgatgcctcggtgttttggatggcctcctgctcccagttatccccaacagcagcaggctggatcctgggcaaggctcctgacctgcaccagcctctcccttcctgccaccagatcagccattgtggctcagggactgcacccccagcaaaatactaagaaggagagaactggggtgaaaggggaggcaagggtgtgtcatgtaagggggggaattcccagggaggattttactccatgagtctgaccctaatcctggagcccatttagactccagggagcctgctggcaaggcagagactgtatcacatgtgggccaaggaaacccttcagtgttgcagtgcatggctgggtctctcctgtctgcccttctctgaccaacccacagctcccacccccatgccaatgacacagctcctctcctggccgctccctgcctgctccatcattgcagggatgccttgtccttcatagttcctttcagctccccactcctttgctcattctccgccattaccctttttccccttttctgagatcttcctccatcagaagaaacagagatctgaaagggatctgacttttgaagtgtctcttgaagatctcccaccctcgccatcaccctaatattcaactccctattatttggctgacccttctgcagccttagaaaaggctggtaagtaggaagccaagcactaaatacagcaagaagtgggtacattgaaaagcttcctgactgtcagagtggctgaacaagggagcacaccactgaagggttgcacaatcaccttttccaggagattatgaagaatcatcatcatcatcaccaccaccatcactgtcatcatcaccaccaccaccatcatcatcaccacccccaccatcatcatcaccactacaaccaccaccatcatcatcatcaccaccaccacgattactaccaccaccaccaccattaccaccaccatcaccaccaccactaccaccatcatcaccaccaccacaaccacaaaaccactaccaccattatcactaccaccactatcaccaccaccaccctcatcactaccactaccatcaccaccaccaccagcctcatcatcacaaccaccattgtcatcattatcaccaccactgtcatcaccaccaccaccattgtcatcattatcatcaccaccaccaacatcatcatcactaccactgcgattgtcatcatcatagcagcctccatttattaagcttttaccatgagccttataccatgttaagtgtgtcatatatattttctcttttaaccctacaaaatagatactttttattagtcccaattttatacttgaagaaactgaggctcagggtgactgactgacttatccttgaacaaacagtaatgacagagctggttttggacccagagagatctacctctaaagtctaagttcttaaccattacaacaaattatgcatcagaatcaccttggaaatgcaataaaaacacagatttttaaactctacctcacaagagtctagttgggtaggcctatgacaggccccgggaactgatgcagttgtcaagcacccaaggtgattctaatgaagccctacggccgtggaggccctgtcatgtctgcctcctgcttctgggtcccagcatctgagaggctccgatcagccctccttagagtccagtggagttctttctaggagatcgtaattatgctgggccctgaggccaggtcacccttcttggaagacgaggcagtaaaaggaaagagtctcagacagagaggagcccagagtcctgctgctgactctcagaaaggcctcgtatctctggggcagagctgcattgtctgtaagcaataacagctaccattttgtataatttctcaaatgagagcagggttaggtaggcagccagaaatttcggggatggcatttcacaaaatggtcattttattcatctaacaagtcatatattgagcatgcactgtgtatcaggtaccatgctgggcctgggggaaaggaagctgaaaaagattcagcccctgcacagagagagtgctcatggtctgtccagggagcctgacatagaaaaccgtaagtgcaaatgtgggttattacactcagatcgtgccctcaggctcctaattccctgaataggtgaagctgccagcctgtggagaaattgtcaggcagacttttctctgagccccaatgtgcttgagggatgtgaagtgaagaacattcattcattctttcaagacatctttgttgattgcctattatgtgccagactgtcttctaggtataagttttttaagatggagaaagtggctgcttttgtggagcctgtattctagtaggggacaggcagtgggcaaacaaatatatatgtgacatagtgtcaggagtggtaagtggaaaaagaaaacggggaaaggagaagggggtggagatgattacagcggaggaacagttaggagaacatgatgctcactccacagaaagcctgatcccagactttgaaacactccccttagacctcagtcctgctttgtgagtgctctggggaaagagcccacttccagcaccctccatcaagagacacctgcagtggcagagctggctggtagccctgatcccactctccacttgaaggacagctgattaggctccaagtacctcttcacctttattctgcttctccagcagccgctgctcaggctagcttgtgctagccctgaggccagaggactgcctgagtcattaagaaacagcgtcatcagcccccagggctcatccttcagcccccaacccaggccagcaagggaccgtgccctgaggcatcctccacagcggctgcagtttctttggcagcagcacacataagcgggcaggacaggcttctcaaatgtagacgtgcaccaggatgaccgagagtgcttcataaaagttggacattcccaggcctcacagctatgaattccagtttagtaaaactggatgtattccaggaatccgcataattttaaccagctccgagatagatgattacagtgcaggtggtccacagactaccctttgacaaatactgtcctagtagaagagtgttcgtgaactgcagcctcttcacagagatttttttcttgacctctccacatcctacccccatctttttgagccagtgttggatggaatctgcttcagaagtgaccattaaagaggatgtgctttgaccttcggctactctaagggacacatactcttgattggacttgtgaagtggatggtgatcattctctttatgccccgccccccccccttttttcaacaaatctagtgagtgtcctgctgcttccctgtctggtttaggtgctgtgagtaccaagcaaaaactgtgcgtgatgtatcagggacacagatgtagcttcgcagctttggtccccaggtcccatcccaatcaccgcccgatctttgcctcttgacaggtgtccttcccctgcttattacaagatgaagaaatggtttagggagtgataattaattgggcctctcttccaggtggaaggaatgtcaatatctctgcgcaaatattctcccaattccattcaaggtgatgctgggcaggggaggagaaagtgacaaggaacaggggaaataacatcttttgagtactttttgcataccagacaccacatgcgcactttgcacaaatcacttccaatcttgacgacagcccttcaaggcagataaattcccatttcaccaataagaatatgggagctcagggagcggaaggaacttggtcccgctattagcaaggacttcagacagagctggaatttatgctcaggcttgtccaatggcaaagcccgtgctctcggatcccccactcctggctattcctcactttcctggaatccctaaaaccccaaatcaaaccccttcagccaggtctgttggtctgctgccacctgctgcaaaccaggacagtgcctgggtcctcatgaccagctgggctgggcgttccttaagaatggcatcttctcattggggcttggtttcattctctctcttcctgtctggatgagtgactatttaaagctggttttgattgtttagaaagccccacgcagcgacctgctgggttgcaattggtaaaacgtctgaaccaaataccacattctctgccggtggctgattaaaggattattaccattttaaaaatagtctatcagaactcaggattgttttctactattttaaaaatgactattttgattctgttcggagagggttttcagtcttgggactgaccttgtggagcttctactggagattgcagggtcagggacaattccctgttgtgccctgtcagtgacatttctgaacctggaccatcgcccagttattggcttatgggcatagaagttgacagtattgtttcagctccaccctccagtttttgcacatgcgagatctctgctgtccatctcatatcctcccttttcatgacacggaagatggcctggacagtattaggaaagtatagtctcccttcctgatttgggagaaatctttggaagaggctgggaaagaaggaagcacaacatcataaggcccttaatatccttcgtttaacttggtctaaagatcagagattctgagcagcccccaagcaactttgttagtgctgtaataagatgagcgtatctttcatctgaggattggaaatggcttgacaggctctaattaagcctttgaggtttgctattcctagttaaagatgcagatctaaactttttctgttggctcactgtgtatcactacgtggatacctcagtttcatttctctgagcaatggaggtcgtaacctcccagcgtttgacctgggtgaacccaagaattatccaaactagaattgcatggcacagtcttgtccttgcctgtggttacatagaaagccggctctactgacatagtagctaacatttgttgtcacctacatgatgtgctgtgctgagtggtgtaagtatgtatttaaaatttttcatcatttcgtcaaccctgcaggagagctattctgtcagcttgtaggtgaaggaattgagacacagagagagaagaagtcatgtatctacattcatacagccagtaagtgccagattgaagaactgggtctgagtacaagtccaagtacaagtacaaggcaggactgggtctgccttcaaagtccaaggtctttccactatgcagagttgtcccagcccatgttggaagggaccttcaagcctttcatggattcctccaacccagtgtaagaacgtttctccattgttcccctgaaagagatgaccgcccagcctctccttgagcatgtcctgggctgaggaattcactgcctctcaagggacacattccaaatacttccaggcactgggtcaaaatctgcctcctaattctgccataataggaatagtctgcttcctctttcttaccagctcttcaaatattttttaaaagtttgattttacttcattcacttactctttcatgcctgaatttagcatagaatttttgagcaccttctctgtgtcaggggccgggaatgtaagattcatgaatcatggttccctcaagagctcataatcttttggggaaggcaaaaactgcagccaggtcttactgtacagggctggtattgtcatgctcttccattttttcctttctcaggcagcggttcccaacatgacgtggctgccacatctctcaccactagtgcttttcagttcgtctaggttgtctattaaaacacaaggcccagattgaacaccacactccagatggggctgaacagcacagagctgagagcactggaggattatgaatttcctcaaactgaacgccaaatttctatttgccacattagcttgcttgctggaatttgttttccaatttttttattcattctgaactctgggccttgggatcaattaattattccacttgcctttctcccaccaggtacacaggtttcttttcatgtgaacttttctagaaattagacctgagccacactttccttagaccatggatttatttcactctgctcctacagagctggagaaactggccaggcaatgaggagagggccagtaataagccttgtgagctgacagccagacttttgttttccaaagcttatatcaacccagctttcaaggggctggctctctggaatgatttgagttctaacccaaggaggaggatggatgagatggctttcctgagtcacccttgcgaaccaagaactcagggatccagtgtcatctttagaaggctcagagaattcaacccaactccttgaaattcctgcaggtcccaccttttgctaggaggtcaggctgcctctctttaatctcctctcctgccatcttgcctgacacaagcccacacagaggcagctctgccccctttccgggggagttgggatcctcctgcgttggcagcagtggaacttgctttgctgcactcctgagtcatgtaaaggcagctgcatttcttatcgtggccctgtgcagctgagaactctggaaaatagcttctgttgctctggtgggaattttagcagacctgcttctctggtgggagccactcctgtccccatatctaggcccttcctccatttcaaaagcaaacaaacctagaacaacagaaaaccatcaaagcgccctgcctgtcagatgacattctgcactgacattgccttcacatggcatggaagaatagtgaggggcatttcatgctctccatggagaggtacccccggcatctgtgcccttgaccccagcccctcttactatgagctgaccccatcatagctccagcccctcctgtgctaaggagaagggctattaaggctcagacaggttgaggggggtgggagggggaaggcagctctgagagtactgtgattgctactgtctaatacattttcaatttgaggaaggaatttaccataaatatgcagatcctttgaagctgcttctgccggagcctggctcagagtgctggagccaggtttgattgctgggaatcagcagccttgagtgccagctctccgtctggggaacagacctccgtgggccagctgaggaggctgcttgacaggcgatttcccccagaaccagtgggagtgactttgcctttgatgaggaaacttcgagacggcagatccgggtggagggagcagaaaaagagatgggtggctggggggctgctttgaaggttactgagaagtcacttatttcttctttttaattaaggggaattggaatgaggtttaaaatagttgacaacatctcatagaatgtcaaaaattcttaagagttggaggtcagcgagtccatctttcctaccagagaacacatcagtgagagtatcattcctgggcttaaaaccccttggcggcccccatttgctttcaggatgacaggtgctgggtgctgcatacctttgagtcccctcgtctgcactggcccttctgaggctctgccccagcaataccagatgctgtgatggtcaggcatgccaggctctctcgcatgcccttgccagtgcacccgtacccactcccatttctcacctggctactcctactcacgtctccaaaactcagctcagtgaggcttccctaatccccagctcctgcaagcaccggtccagtgctccgtttatgtgctccctctactgtagccttttcacactattattcagtgctgggggctccctgagccagctgagagtggtgctcagtgcaggcttggagagcgaatacggagcgaacgagggactggtgtgtgcacagcccacctccctgggccccggggaggtgtgcagggggcacacagatgtgctgtccgggcctaaggagctcatagccaacagggacaccagagccctggggacctgaggattttgtcatgagagttctctaaagctactgttcaccaagttgttcaagagagatttcctatgacaaacctccccgctgacaactggaatttgaaaattgaagcagaaggcccctccaatcactgatatctttcccctttccattcctttccatcctccaagaacagtgctcccctacttcactaaaaggctctgaaatactttctcctgtgagtgaatcaggctctcctgtccaccccagggacaacggtcaaggggcagatgagctggctttggcaggatgtaacctgaagggtgttttctctcctgccttcctggcccatgtaagtctggttctttctcccaaagcacagggacttcctgcttatcagctttgatggaaaattcactgactgcagaagcttattcacacatcagccggcaaacaaattagagctacttaaattttcaagctgggggctgcttttgggcagaagagcagggttttaaagtgctgcattttaaatgtatttcttataatgtgccccatcacgcttctgcctgagatcagtctggggaagtttgccagttcccagtgactcttttccgtgcctcttcagccagctcatgcctggaagagctggaagaggcggacctgctaattcggtctcaggaagcagcctgcgtcagtcagctctgatgggaggtgggccaggccaccggccagaggtgtggggtttgcaggcaggcaggcctggggaaagaacaaaggtggatccagggaggtgagggagccacatgcagcagcaggcagcgtggggcactgggaagggcataaggcttcatggtcaaaggctcagggaagagtcccagctctcccagtttctgttctagcattctgtttctcaatttcctcctcagtcaagcagggatggtgatcatcatcatatctgctttatgtgcatcataaaattattgtgagagcaaaatgaaacattgtttatagctgtgctttgaggattctactatatttgcaaattttagttctgtcatctcacacagagatgactatctatgtatctgtctatctttgtgtgccgtattcccggagtctcgcttctaggctggctcagggcagagagaagaacaaaacgggggtgagcgagacgcccagggccaggtcactctggctgtaaccacgcaaagaccggcccatgccagccaggcggggtgcacaccagctgtaccaggctggccactcagggcttcaggatggcctccccacagcctctccctctcctgcctctctccttcctccacccctgacccctcctttttccactctctaatgtggcagcctcactggttccacttggcagtggctctggttttgtgtgaagctgagggaagcagaagctatggtcccactcctatgagaatcccagcaccccaaaggcctgcccgacagagcgctgctcagacaagagctgccgacaccctcaaaactaaaatttccccatccagccagagcgctgcaaggcccgggcacatgctagctgcctgctgtgagccagcttccagctaggggcagagccgggccatgctcaggccatcgcagaaagctcagaagttgcatcctcccctgccctccagcatgctactgacttcagtgtcctgagttccagaaggacggcaagtaaccggcttccttccacccgggtgcttcattaaaaccgtgagttcaattggcatctgccactcagagcgcaaagttgtgttattaatacaaccagctttcccaaggtacttctccacctggtgcgtttaacaaatgaagccaggcatggcctgcctgtgtcatgttctttggcagtaaatctccagcatgcctgagctctctgataaattctttcctcggcagctaattcaaaacaccttctagcttcctggaggtgagagaggggtatgcagatgagtcctcgtgttgactgatcctgccatgcactccgcacacggcaatttgaggaaggccaatttgatcatccccaaaaatgtttagaagtgagtctgtgagattttcaactatgcaagaaaagaagaggaagttggggtgtaggcaacataaattcttcttttttttttttttctgagatggagtttcactcttattgcccaggctggagtgcaatggcacaatcttggctcactgcaacctgcacttcctgggttcaagcgattctcttgtctcaagctcctaagtagctgagattacaggcgcctaccaccacggctggctaatttttgtattttagtagagatggggttttgccatgttggtcaggctgatctcgaactcctgacctcaggtcacctgcccgcctcggcctcccaaagtgctgggattacaggcatgagccaccacgcctggccagcaacagaaattcttaaaatcacttagtacttctgtccgaaaagaaaggagatctgagcatcctcacagctcgtctctgaaaatttaacttcagaaaccatgagctaggtgggaagtctattaagttcatacaagcatcatacaggggtggcatttttagtcagagctgactagggtggactgagctccactcctgccctattattttcgccgtcactggaatctctgagaacagccaatgtggttttattctctttggcaagaggagtggtgagggctagaccaaattctgcttcttatgccagacgttggggattagggatggaagtctgggcaggtcttggcacaagctacacattcgagagcagacaagtacggttgatcctcattatttgtggattccatgtttgcaaattcaactacttgctaaaatctatttgtaacccccaaatcaatacagtgcttttgcagacatgtacagagcagcaaaaaattggaatcactgatgtgcacgttcccagctgaggctgaacaaggctgcaccgtgtcttcttgtttcagctctcatactgtaaacaagtgtccttctcacagtccacttcatgtcacatcttgtctatttttgtgctttttcttggtaatgtttctgtttaaaatgacccctaagcatagtgctgaagtgctatctcgtgttcctacctacaagaaccagtgatatgccttccagagaaagcatgtgtgttaggtaagctgcattctggctgagtgagcgtgctgttgtttaatgttaacgcatcaacagcatatattaagcgaggtgcctgcaaacagcaacacatgtaaaacaaagtgattgattgattgaagaaagcaccatgaccagaggctcacaggaacctagccctgtatttcccataggaacaaaaatggttcggtattccctaattcagtgtttgtggcaactttatagaacagaactaccacgaataatggaatcacctgtagtgagtttcagccaagagagaagaccaggaatgagcaaatgtatgagtagctgaagttttcctacagtggccctttctctgcgttcactgccccgtactcctgctctcctgttttctcacaaagagcaaggacttcatctcctgttgatgtcctgcctttctcctggttcccctgatgcagaagtagaatccagatcttatattcctgcggtcaaaaagaatactaaagggcttctagaccagcactctaattggctgcttggattcttgcaaatggatcatcatagagtctgtttgaatgcctccagtgtcaaggaactcatcacctacaggaacagtatattccatcttggaaagctctcattcttggaaagttcttctatctattgggcagaaatcttcctttctaaagcctctttcctttttccttagttgtgtttcttgggttcacacatctattccacccttcctgtttctaccttcatttcgttcagctcagagagggctgttttgtggcagattggagaggagccttccttgtatccctcacatcagtggccacctgcctcaccttcatgccagggaagcagtgctgcccgtggcctcctaccgtcacctgtctgagaccttctggggttgcctgctcaggaaactgctcagacaagagttgctgacactcacaaaagtaaaaaagaataagcccatctctctcaggctctgccccaagccactctgcaaatttacatcactttataaataaacccagcattttcaggaattcctgtttgagctggaaggggcaagcctgtatccttcttttataggtaagataactaaagataaaaagaaatgacttgcccaaaagaactttgtaattcaattcaacagatatttactgagtaccctgtataggccaggcactgccctggaagctggggccacaaacgggaatttattcacgcatccagccaatatgtagtaagtgccaatttcatgctaggtattgggcatatgatagtgaacaagacagagtctcttcactctggtacaggagaggggcgtgaaacaaataattacctaaataactatatgattacaaacgtgatgagtgctacaaagcagtagttcagggcactatgcacaagtctgtgatgtgggtcttgatggagacaaaagactgggaggggcctccctgaggggtgacattcaggctgaagcttggtgggtgactgggaaaccccaggtgaaggggagtgtgaggagcctgagtgggaccacccagaggcggttgtggtggatggcagagctggttgggaagccagaactcccactctgcttatttctctgccgcctagcctccccttcctcaagctttatttacgtatcctcttctaaatatgtaactcagaatcaaagacaagggatagcaaaggccaccttcaaggatatggggtctcaggcaggaacgcttgtggcaaatgccaatggataaaggataaggattcgaatgtttactaaatgtttaactgtatagtcccaacccaatagaattaatatctattagtattagtatctatatctatctagtagcataacagacctgcctgggtttgaatctgcattaactatggagctttgggcaagaaacccaacctctcagagcctcagttttcttatctgtaaaacaaggatgatggcagtatttcccttgtgatgtggttgggaagattagatgagatgacaaatataaagcctttagtccagtacttggcatatggtaagtgttcaaaagtcttagcttgtataattttcttatactgtagttagtccttcagttataacaagtgaccaggactaggagttcattgatgcaaaagaatatatttattgagaaccagttatgttccaggtactcagctaaggtctgatgatagagtagtgaacagatagagtgtccagatctcttatgccaggcacttgtacacttcttgagcctgacttacatttgggttgcaagtcaggatgcacataaacatccatctatatgtaactgaaaccaaagcttgtgaaacaaggtacccctgctatgtgcattacaccctgatctattctaggtatagatttgctttttaaaatgcatgtcttgacccactgaattgatttcataacccactaatgggttgcaacccacagtttaacaaaatactgccttggaccaactgagttgcaggcttaataaagcccagttagagttcccagccttccctggacttgtttttgatctcttacccttggcatttaccattgctttcttttgatcctgaattttcagcattattctgcacaagcatgtatttgatggttccctctgctactagaatgcagcctttggccaacttcagcatctccctttgttccccagatcacccactccaggactcggttgggctcttgcttactcatgactcagtctcctctgtgaatgaaacttttatgattggagatattagatttaaatgcagtaagcgtttactccctcgtgccaaggtgttcaccacggaggctaatattacaaacctttttagttggttttatttcaaatacagatctatataatataagagactttgaaactctaacaatctcagtttattcctgggatccctggccatagtgttttcacctgaatgtcacttttcctgcccatatgtcagaatcacttctgtgcactcaagaagccacaaatacattattaatatgcatctttcctagtaagaacttcaacttagtaccctgaacctgagagtaaaaaaaaaagagtcattggttatggttcatctgactttggatgtccctggagaacaaggatctgaaatagaataaaatagaaagagcttacatttttttttttttttttttttttttttttttatgagatggagttttactcttgttggccaggctggagtgcaatggtatgatctcagctcactgcaacctctgactcctgggttccagtgattctcctgcctcagcctccggagtagttatgattacaggcatgtgccactactcctgattaattttctgtttttagtagagacagggtttcaccatgttggtcaggctggtcttgaactcctgacctcaggtaatccgcctgccttggcctaccaaagtgctgggattagaggcgtgagtcactgcacccagtcagagcttgcatttgaataggccttgaaacttttgtcacatctgtaattgcctcagatcaccctaataaggggagaagggaaggggagctatttttatcttataggtagcaaaatcaacttcccaagaccatgtagtaagttggagggtggaacttgaacccaaatctcctgacttctggccggctgcattcccaccaaatatacaatggtaccgttaaatggtaccattatcttatgttcccatggcttattgtggcttgtcaaaggccatcacgtacattatctcagttgcttatcaacaacaacaacgctgtactatgggtaggcaggttcatttatttccagatggagaaggttcagagaggttaaatgccttaccccagctcatacagcttatgcatgggagaggaggaaaaaaaatgtgggtcctcttgtaccccctgaatccccttgtgccaagctagctcctaagcaaccactctgggccctggccaggatcactcatatggcctctttgaagtgactcccttcaggactatatttagtaaacaagttcatgatgatcagagaggaattgagaaggcccaggccttaaggtcaagacaagatacacctgtcctaactcaaccagatggtatagtaataaatagaacctaagttccaatctcagtttaatctcctattaactgtgtgaccctcagcaagttgcttgatatctctgagtctcactttcattcattcattcatttattcaacagaaaggtgtatgaaagtgcctacattaagcattattattgttgtctgaagtacctccattaagcctacatttctcaggtgggaataataacaaggttgttgtgcagaatcaaggagatttacgtaagcagagcacatggctgagtgcccagaatgcaaaggtgatcaataagtgtttgcaaaacctgagtctgaagccgaaggacttaccctgccttggggttacggtggcctccctagaagaagctggatcctggcactgctgagtgcaaagaacaatcatctaaatgtacataaaatatgaaatgttatagtgctgcgtgcacacccacagatgcaggcaaagatgtgaggaaatccctcgaggctttaaaaatgaatctctttttacctacttgagagggaacaaagtggcaaaatgacagccctgtgtgattctaggcaggagtgagagctgtgagcaggcaggattgccagggctccccctcagcggcagggcgtgcaagttccagggatgacacccaggtgagcctgtgggcctccaggactggtctataggaaagggcctgagggctcactgactgcagcctggaaggaatctgagccacagagaggggaaaggacttggcaaagttcatttcatccctgcttacacaccaggcactgtgctatgcccgttcccatcgctgtcttgactctgaaacagaatagcacagtggttaggagcacatgctttggggatgcagaaagcatgggtttacatccccatcttggtacttagcagcatgtgactttggggacattcatgacctaaacttgctaagattcaggacgtttaaaatctgtaaaatgagtacaaaaataactccctcttaaagataggctgaaggttaaatgagattctacaggcaatgttcctggtgcattcacttaactcgattttattgagcatctgtgataagctaggcactgtgccaggctctagggataaaagggcagtcaaagctggccatgatccctactctcatgaagcttattatctagtaagaaagataggcggtaagcaatggtcacatcgatgaatgtttggaaggaaaagaacgtggttctgggaggagtccgactttgagggattagcaaggaaaggcttcctggaggaagggacctttgagctgaagcctgaggggattaacagatgtaaagtagatcaagattcagcaaatttttttctatgaaggtccacgtgataaatatttagactttgcaggtcacatggctctgagcaaatcagcttttgtagatgaaagcagtcacagtgcacgaatgaatgggcgaggctacgttccaataaaactttatttcagaaaatagggagtgggctgcattccacctgcagtcccgggcttgccaactcctaaactagctgaaaggggctggggggcaggggttcatgtggcaaggagagttccagacagggaatggcatgtgcaaaggctgtggcgggaaggagcctgttgcacttgaacgcgggaggaaggtaggtgtggctgcagcacaggtaaagctggaccgaagagcatgagaagaggatggagagtgggcaaaggacagacctcatggggctttgcaggccatagtaagagttttggtctctatccttaagccaacatgggaaagaattgaagggttttaagcagggactggcgtgtatgtgagatttggtagtgacgactggctgctgctgtgtgaagaacagaacagggaggcccagagtgaattctagtcccaggcaagatcagtggggattttgattagggtggaggctggggaggggtgaggctcgaggaaattaactgacttgctcagggtcacccacctgtggtcatagtgccaggtactaatgggggtctcctgatgccaggtgacacactgcagcctctgtcaggaagccccagaggacccctgtggtcctggcccctgggtgcaggactttctgcagtgcattgccgcagaagtgaccagcttgcttatattgacctggggtcacacgacagaccaaatccaagtccctgacactcattcagttgtacagtcatctcctttccaaaggactatgggtagcccctactgatgccacggaaccattcactacaaccctgtggccctatcagcccccttgtctaggctctccttaaaattctttcaagcttggtccctggctgctctacccaggggtcctagaaagacagaggctcagagacagcagtcgtaataggagcaagaagtgatggctcacagtgagaaaagaaacagacactacgagaaagcagacaaattaacgtataaaagcgcagaactgcaggcagtggccctccacatttcagtaaccccaagggtagcactgtatcaaggcacagtgtaataactggcttcgtaatgataacactgcatattaaggtagacaggctccctgttcaagaggacagaggaacataataattcctttagaaaggagttttggaaacaatggttttgaataaataattaaactctcccaaattttaatgcctcaggagcaagatcattattaatttatatccacctgtgtcccttggggatgttgggtaaatgatacattctatgtacgtgcaaacacatcccatatcggttatatttacctaaattttaatatttgactaagcagtcctatcataaaatgtttcttgtaatggcattaagaatctgtaggtagaaggactatacatttgttttaaatattgtggaaccaattaagcagccattggccttgtctggaatcctattttttctactcaccagctctgcgagttaggtaaattattaacttatctggaccctgctttccttatgaatacagtgggggtgggaatgggattagtatgcatcaccttctaatgcccagcacagagcccctgtgagtatggcgggcaccagtcatgtgctagagctggcttgccccagcctgcaagagtccgttgtacacatccgttcccagctctgtgcttggtgacatcatgttggcagctttaaatcagccatagcgggtgtgtttacaccacagaaattggcaaatgctacacatgagggtctttttttttccccccaggagagccagtttgtaaacatttcctaactgagcatgggcgggcactgaagcactgttaatctctgcaccctaacctttctctgtcatcctgtttgtcgtctgagttggtctttttgctcggctctagaatttctgatttagtcattctggggtagggcccaagaatttgcatttgttttcagttttaattttgtttttcaaatgtccatctcagagaagaagagaatttgcatttctaatgctgatactgttggtctgggaactatactttgagacaccgtcctaatctgcctaatcaactaaagcccatagtgtgaagcctttcacagagcacacaggagatcccaccttctgccttgggcaatggtattaaaaactaataagggttgacacagtaccttgcacatacaccatctcccttaatcttaagaacccctatgaggtaataattactattttaatccccattttatagatgggggaaacaggctcagagggattcggtaacttacccaagttcacgtagctcatcagcagagaagccgggttaaactcctgtccaactttgcgttgctggttctggttgtgcaacacccaaggatgaagtccagctcgaactctgcattcccagggtgcagtggcagggccacatcagcccagaggggtgcttttttcttatctgcattaagatgctgtttgtaggctagcagcggccctgtccaaatccataccttctcctccttcactgcaacccctggggcctctaaacagtggaaaggcagagcaagtgagagagacagaaagtatagagggagccaaggagagacattatttgaagcaaaatcaagcctgcacatgtgggcatgtggaagcggcttacaaaacagctgttcctacaggaggtttggggggcaggtgtcagcagggtggagcaaagggatttggccggaggcagagccacagattgtcagtgatgaaagagctatgtctcctgcccactcctggcacgtgtgtggcttcgagggtgcccagtgggtggggcaattagcctgtatcccagggcgcctggctctgaatctccctttccctcccactgcctttctgcaattagattgcactgggtaatagctgccaagccgctttgttggatctgatgagtttattaatttcttgggggctaatgggagggtgggtgggggattcatttcctgactggagcttgggggctaattagtctctttgccgtgtccccagaggagggaggtgggaaggtgcgttgctcaggctgttggatctggctctgggtgtatagttcctacccctggcttttacctgtctcatggcttgggtcagaccagggagtctggggccggggcttcttttagcaagtgattggtgaggattagatcccttgagaacagtggcggtgggaaagtgggtagcggggagctgaggtcttactggctctgttggtatgaggtttaggatgacagaaaggactctaaggagttcagtcctgttccatacatcccagtgctgacatctagcccaattgctctttctgttctttctgcctaaatatagcccctcccagcctaggagtccattgggagccaattctatccatttttcagacagggaaactgagcctctttgaggacaataatttcacctggctttgtggagtgtcaagaccaaggagaagaaagctatgtatttggacttcttaatggaatggccctagaagccattccccggttagcctggcctgcttaagtgaagggcacattcgtatccccaccccaagagacagcagcagaaacaagaaagatcacagaattaggagtcagacagatctaggttcaagcccgtgctacacctgccatccggggaaccttaggcaagccattaaacctctctgagcttcagtttcttcataactaaaacagaaacacatgtaactactcgaaagggttgatgggagaattcagagatgataggcttgacacatctaacacatcaggtgtccagtaactattaccctttccccattcatttggaaaccttaacagctcatccctcacccatgcagagaggaggaggaaggggaatctcaggccataacatggcctggctggtccctttaagagacaataggagctcccaaggccagaggagggctcggagaaagagaaagtgccttccgccctagcctcaccaacaacagcaatctgctgatagacaatggttttccctcgcttccaaagccaggcccagagcaagggcacaagcataagtataagaccagcacctgctgtcctgagccacacaggctgctcatggggaagacacataggtaaacaagcatgtgcaattgaatggtggaggagtcagacaggatgaccaggcaggcttcctcaggaagattcatctgggcttaagagtgcagggcttaaagctcaggcctctcagctgacaggctctgtgacctcaggcaagttgggtgggctcttttgttttggcctcagtttccttatctgtaaaacggggcttgttgtatggatgtgtatgaggccttgcttgtaaactgaaaaggaacatgaacacacacagaaccatgctgcccttgcagagatggggacagctgcccacccttttccaggtggcattcttgcagggcgtggacgggagcatttggtcatctccccttttccacaggaaaggcccaactgtagagaccataaggctcctgcctggaactggaggcccacgagagctcccagctgatggtctggggtgggcctggctggccctgccatccacactctccaccttctccagactgtgaagcagggagccactccctctcactctcagtcctctggccccatagggtgggggcggcgagaaagggtgaaacatgtctttactgttgctggaaattccataaaagaacccagagcccagttctgcggaatagaaccacatggcatctgtggaacttgtgtgggtcttccagggaagctgctgctactgcctgcagaagcctggcagagaaaggtgtgtgcatttcattgcgtttttagccagtcgtctctcctggctgcccacctaaaaacactcagcaacagcaatgatttgccaggggctccagctagtagagatatattgggattttatgtatatagatatgtgtgtgtgtatttttgtatgtataaaaagagttctggccaggtgcagtggctcacgcctgtaatctcagcactttgggaggccaaggcgggaggattacttgggtccaggaggtcaagaccagcctgggcaacataataagaccccatgtcttattaaaaaaattaaaaggagacatccgttgggaaaaacaagcaatctaaaaacccattgctgttgagtttagatttaggtaacttaccagaatgaagaactgagtaagttgtggatttttttcacctggagttctttgagacaatgagacagacaacagtaatgtattgtacatttaaaaacttggtaaaagagtacatctcggccgggcgcggtggctcatgcctgtaatcccagcactttgggaggccgaggtgggtggatcttgaggccaggagttttgagaccagcctggccaagatggtgaaaccccatctctaccaaaaatacaaaaattagctggggatggtggcaggcacctgtaatcccagctactcgggaggcagaggttgcaatgagccgagatcgcacaactagactctagcctgggtgacagaacaagactccttctcaaaaaaaaaaaaaaaaaaaaaaaaaaaaaaaaaaaaaaaaaagagtacatctcatattaagtgttcttatcacaataaaataaaaacaaaataaaggaaacaaaacacaatagagagagaaaacgaaagacaacgtggaaggaaagcagcatgtattgagtgccaggttaaatacattcttacaatgacccaatgaggtttctattattatccccattttttagatgagaaaacatgctcagagaggttcagtcacttttctaaggtttcactgttgagatctgcgttcctgggtctggataaataatggaacacccactggcacatacatgagaagctccgagaaggcaggacaagcattatcatccccatttatacatggggaaactggggttctgaaagatgtgaataacttgcctgagttctcacagctaataaatgagtccatctggactagacctgtttaggttcattcattcattcattctttcagccatccagcaaatgtttatcaaagggcatagttctctccagtatagccttctggttcttattttgataatcagaaatgattgaaggcaggccggatcaaaagaactccgcagcccatccctgcctcaaaataatgtgattccacatgttccattcctttctgtgtgagagaacttcaccaaactgcattcattcctgatttatttctccattttcctctcccacctctcccccacatctttattcctttcttccctgactgttacagcccccgtttccctcagccccccaaccctgggaaacagtctcccttctgcagttcagcccccggctccgtactccacacccctccctgctcacatgcagcccagccagaggcagaggtcagcctcttggctccttccagctctggaggccaccatttcttcccagtcctctccgttggtctcctcagatcggccagtggcacgtggcagagggcctcagcatggacagccacctctatgcctccaacatctcggacactctcttcaacaccaccctggtcgtcaccaccatcctggtaagtgggctctcctaggctcccagctgcagcatcctggggtgcctccccggctctgagcactcacaggctgccccttgaacagaagatgggagctctaatcacagcactgagcccaatttatgacagcgtaattacactcaagttgctgtttcatatggaaatgatatttgatgagttccagagcaggtggggggagggttggggtggagagacaccacagtttgtggatgcctcttggaggcaccctgtcagctggggcaactgtgcaggaggaagggaaggggacctgtgacacagagcgggcagctggatccagaccctgcggacccctgccccttcccagcagcccaccttgctgggtgcctgctgtgtacaaaacaggaccctcccccaccacatcctgaagcggacatgggaatgtcagtgggtttacatggtctgtttcttcatttccaggtggtaaaaagagagttctcaatctatagggcaagaggccaggtgcagtggctcatgcctgtagtcctagcattttgggaagctgaagtgggaagatcacttgaggccaggagtttgagaccaagctggccaacacggcgaaaccctgtctctactaaaaaaaaatagaaaaattagctgggcacggtggcacacgcctgaaattccagctacttgggaggctgaggcacgagaatcactttaacccaggaggcagaggttgcagtgagccgagatcgtgccactgcactccagcctgggtgacagagtgagactgtctcaaaaaaaaaaaaaaaaaaaaaaatacagggcaagagaccatgtgcccttttttatttgattctcctctattcagtaattgccaagttcaccctcccttccctgtccccctgccatgtgccaggtgctgtacccagtcctggagaccaaagatgagtaggactcagctctgttctctatcctgaggttgtaagttagtagatgggataagtcaagtgcatacatggccaaggtattatttgtcttcccctctgaagaccttatgtttaaaagatttgtcaattaaaccaactacatgtattaagcagtaattagtttgttcctcccctcccccttttaactaatctaaagcacttttccctgcctggcccagcatcttattagcaggagatagccagtggaacctcaatgatatcattgcagcccagagcaaagaggcgatgcatgagttcgcctcctcagccttatcattgctaactgtgcaaggtctgcaaatgtgtccatgtcttttaggcttttggagataataaaaagagttcaaggacctccatcactatctttatgaactcctggggcccaggcgccctgggctgaaatgattgatctactataaacagaaagagataaaagctggaaagagacacacacctaggactgtggggtttcaaggagagagaggtcccctcccatggggaggtcagcaaagccttcaggaaagaaggggcattgacgatgggctctgaaagacagggaatgagtggggaggagaggtcaatgaaggagggcattgtcgggtgttcaggaaaagctgaaaggtacaggttttcctgagaaatagacactggtaagaaagggaagaggcataagccagaaaagtgggttgggtccatagagcttaggaacttgaatgccaggctactaagtttcccttcactgtgaggagatggggtcactgaacattttcattcattcatttatttatgtgatgactgtttattgggtgctgctatatgctgggcactgttgtaggtgctcagagtgcatccatgaaccaaaaagacaagaatccctgcctgtaaggagcttacattccagcaaggaatgtgtgatagacagtaaaaagcaatgttgtcaaacaatgaattagaaggcagcaaggctgaggaaaaagagctggagccgggaagggcctggggtgctgagagggttggtgatgttgatacccaggggtcagggtggcctctccgagaaagggagcattgagcagagacctggtggaggtgaggacgcagccaagtagttgccgggggaggggtattcttggcacagggagctgtcgaagcaagcactgagagagcagttccagcccccagggtttcacccacgcccatctctgctcagccttagcttatctgaaccagtgtgaaaatgccagaaagatgagagggttgcggtgtcgctgtccagcagagagctgggaacagcctggctgagtccactttgggggagggggtgcagcacccagtgtgattgctgggacctgcttcccgctgtcttcttagtctctaaaaatcttctggatctgtcctcttctatccatccgcaaagcccctgccctaatccaggatcggggcccctctacttctttctctggagccgctccatactctgctggcaggctcccttctttgtctgcctgtcccccgaccctcctgtcagcgtggtcatttgaaaatcagaattggcctggcatttccttccttacaatccttcagccactgcccaggccctgctgccccttaccttgggacataacccttgtaaccaggcccagcccacctcgccttctcctccccatgcagcatggggtctagtggatggctcaagacctgctcgctgcatcctgcccctccctgccttggcacatgctgttccttatgcctgggttacccttccctctaatttctgtttccagctggaaatgtctatgcatccttcaaggctctgctcagatgtcacgtctcccacgaagccttccctgctctaactcctgtcctctccttgtctccagcatttttccctgccccctcccatttctcttattagaggtcattatttaaagctttacctccccttctaggatgagagctcctcgaaggtagaggggctgacacaaagtaggagctcaataattagaatctgagtgaaggaattccttcctacagggtaggggtgtcccttaaaagccagcaagactttgggagggagatggggaagtggctgggctgtactgccagcctctcagagccgggaattacaccgtgcttggagttctggcacagatccacagctacgccaagtccacagggtcctgttgctagtctgggaaagtcaccctgatttgtgcatgtgtgcacgtgtgcttattcacatacgtgcacgtgctcatgaggggtggggtgcaggccggacactggtgtgtgaggtgacatttaacaacatggtaagtacaactcaaacaactattagccttggttcttttcttgcgcgtgtgtgcctacagtggctgatccaattcgatagctcttaccaggaatgacgatcttaattcagttcccaggtgaccatctgtgggttttccctggcaaatggtaatcccgaatgatttatcccttaaaactcagcacacattcatgttgtctccccgctctggtcagggcacacttggggacgtgtggatggtttattggttaatgccagcaaacatggaattggctgccgctcccattccctgaacaccttttctgtatcagaccccgtgttcagcggtttgccacattctcacctcgcgttcacagcacccctgctccaggctagcactcaacaccccagcattctccaaggtgccagtgagccctaaccatccccatccttgggctttccaacgcgtctccaagaccggccttgtgtctgttcactttgaatatgtcaataagttttaaattaacttgagagtagtgagtatttggggagaagaatttgtgacaccccttgggacaatcaaagatacaatgggacattaccagtcctgagatggaaacccccagccatgccctgtccaggaagccatttgtttgcttcttactcacatgatcggcaagtgcttaatgctgagccaggtaggggaaccaagcaggtgacgagtctgtcccaggacccactcccattctacctagagcaggcgcaaatcggaaaacattggagggtgattgtgtgggccctggcatgagagcaggggagttctgagacatgggttggcacagaaggaggcagtgtgactctgcggacaaagatgactaggtgaggtggaagatgggggagtgtgtggagagtttgtgcagggagaagcccttgtgctgaggacggcgtgtgtggaaggcaggctgaccgttcctatctcattgacgtgacagtggactcatccagaatcagaatcacgtcaccttccactcagagctcccgctccctgacacatgacctttgccttctggctgcccacttcatcacgcccacatcctgctctccctcacagtccctccatgaccttgtgtctgtctggccctccatcttccccagcctagaagtccttctcagaacgagctcagcccatcaggatttcagtgctttcctctctgggctcctagaatcgtgatgtgcaggtttctccatgcacacctgtacccaagcccgattgtccctgccacccctgctcccagctgcctgtctgcatccagcctcccctctgcagccgggccttggtaatccctgagcccagctctcctctgtccctgtcgcatcccctgagcggctctgctgaaaatcttcccacacaccaagactcaagcctatctgccccactttcagcacaactctggggccagcacgagctcccttctctctgtgaacccacccataccctctacctcacctccaggctcaggcctcaacctcaccccgccccaccctgcctccaccctgcacttcctgggcccttgctccaccagctagcatggttctttcctcctcttttctccccttttccagggattttcccttcctgcctgtaaatacaccctggactgtcccatcctaaaacaccatcgccttcacctttcctacaccctgctgcccttcaagctgccctccaacgtagggagtcacagaatcacagaattgggtgggcccctgggacccccagccctgctgtttgcggtggggaaggagcttggaggagaggcgatctgccctctctgtgcctgccgccttgcctcccttagctcctaacctgtcaaaatgctgaacagccctcactcctgtggcactcgctcagtcctcatcctacggagtcctgctgcccccaccacgcctgccttcaaaaggtcggcagtgacacatgatcaacacgctggttcccagccctgctaggtctgtgagaatggtgggagtggctacatcctctatcttccaatttcctcctccttgacgctaagatcatgttcccctgattttcagccttcctggctgcttctgtgttgtcttctgtgattgcccttcatttccccactctctaagaccaggttctccccagggcctcttcttcttcctcttctgccctttctcaactcttccccttgacggtctcacatattccccagcttcagccttgatctctgtacatgtgcaatctctggcccctgtcttacccttgctccacattttaaacacccagtgggtcacttctgcctgcgtagcctgccagcacctcagattcaacctgttccaaatcctcctcccctccaggcattcgagcccatcatgacaccaccctctgttagtcatccaccgggctccaaggctctgaggacccacacccaaccaaccagttatcagacctgttcctttctgtgcctcttacatccttctggctttctccaatccaacctgcagcccaggattcagggtctcatctcaggagagggtctgtcctcacccctggatgcttcctctcctactacttagtattccttactcgcagccttgcgtctttaaaacgcttgatgcttcccccctataccttgtgtaatgtgcagccaccacttcctggcatctgagtcccatccatctacatttctcctcccatctcgcccctgctcacaacctgtgctccggctaccctggaaggtccatcgtccactgagcagccactcaggatcatgcccttgattgtgccttcccctggcccatgcctttcattcacagcccttccatctctcagtgttctgcctcctccagagcccagcttggatcccaccttcagcttggagccttctctggacatctcactggagagacctgccctcttcccaatgccctccttggactgcagttgcacatgtacctgttcttacctagcctgcttattgcagacatccttatatctctgataatgcccagccattggtctgcctggaataaagcaggggtagaaaaaaaagagagagatagatagtggggtcagatgatgaccttaaacaagttgaagcagcttgagcctgaccctccatgcagtgggaaccactgtgtgttcctgacaacagaagcaccttgaaggacagctttaaggagcacatcagggagaggagctggtcatcaccccaaagtagcccattacccacgtcagtttcctccttctgccccatgtcctccccgaccctctgtgcccctggccctccccatcacacgcgggtgagacaccagggctaagatgagaatgacagctgcccagttttgctgcaggaaaacccatatttaatgctgaaggggaaccaccaggagatggaaggcaatgaccgctacgagggcttctgtgtggacatgctcaaggagctggcagagatcctccgattcaactacaagatccgcctggttggggatggcgtgtacggcgttcccgaggccaacggcacctggacgggaatggtcggggagctgatcgctagggtaaggagaggacaagtgatctgggcctgagggtgggctgggagggattggaagagcatgaggttgtgctgcacgctcatgaaccctccatttgttcagtcaatcattcatgcatttgtcatttatttgtccactcattctataaatcttgcctggactggcacagacgtgcggtggtggataagcctgcaatgatccctatcccgtggctttcccagtccagagcctgtgacaagtcatggaggctctgattgattaacacagatgagggagtttgggttccatttttggtgctttttgattgttctgattattttgtggctcattagcactccctagcagagcttgaacaggtcctgggagaagagaatgcacccacatcagctggcttggatccttgagagacactgccaagggagacgtggctaaataacagggcaaagggattgactggcagaggagttggtcacagctacagttattttcgtacatcttgtgttatctttggttagcgttaatgtccttttacagaccgagggccaaggtgtgcttggacctgctgtagattttcagggtgaatgtggagacgtgattaacattcaggtgagcattggagaatgtcagacatctgttaggttagagcaagggtatagaaagttcttccagggggaaatctcttgttttctttgtacacactattaacaactgtaaaaattaattaagtcattgggaattcaccatccatatttccataactgagttttaatgatcaggataggtgatgaggacacaatgcagagagcacagacctgggttcttgatgtgcccttgatccaactcttttcccctctgggctttcaatggtagaaggagctcctgcagcctcccagcatgtgctgatgtgcaaggtgttttacatgcattatctctaatcctctttaaacacaccttttagctggttgttagtcccactttacaaatgagcaatcgagcccagaaagcttgagtgacttgtcgggagctatactgttagcatgaggcagggctcagattggaacccagatctttttctttattgaattaatatgctttaaaccctttatatcaaacaaacttggaaatcaaataaatttttaaaatcctactcttcaatgataaaaatactatttgaggtattaaataagcagtccttgacaagggattgggaaaagtcctatgtagatgagaactgtggaaaaggtgtttaagaactgaggagggaggatacttcaggagtttgcctgacggaacatggacggcatctgcaatgaccgagcagggtaaaatggccagccttgttctgggaattctgaacgacccagggtgactggagtccagagagggctggttcagaagggaggccttgccttcagaggggcgcttgcaaacagacggctgacaagtcaacagaaggctgcagaaggcctagggagccctggacgactgccatgggggtggggatggcagggcgaaggcttcagcagaaagccctctgcagtccttgagcctcagttttcgagattcaagcctgatgatgtacgtgcttaagtggaagaggatttgtggctttctctacttagtctttcagacccactcctgaaacattcttcttatttggtttccactgtgaaggtgcagctcagtagttagaccatagaaagccgaaatgccaggccttttctttaccttcttactgatgtccttgttcaccttgagctgatttctttggtctccttgggctgcctgatgactggtagggtgacttcagagacggcggtgtcagtgcacagccatctccttattagccccctaatgagctgtgacatagactggaggacaaggagaggagtctgggactcatagacatgcagccacacaccgagtgacttgaacagtcagaatcttagaattcaccccagatctttcaagcaaaaatactgctgctttggcctcattgagacttggctacttgacatgaactaattaattaacccattaattcaataaatatttattgaacatcttccactgttgtagacactggagatacaatgggggacaaaataaacacggacacagccctcacagatcttctggactagtgagtgagacggagatcaatgaatgatcgcattcttgtgtaatttcaagctgtgataagtgcaggggaggcagagtggaaggcgttgtaggagaacatctagaggagagtaggatgcacggtgggcgcacaatggggctgtagggggaaggcttcccttgggatgtgtgcgctggcttagggaggatgggtgggagtttcctgggcaagcaaaaggtagaaggctgaaggccgttggtgtgccactggggttggtcctggatgggagttgatgacactgggaccccaccatccccaggtttgaaggattgggatgttttccaggatgttcccctaggattgtggtagccctcaggcctggatcccttctttgtgacccctttcccaagctgcacaggaaaattccagaggctgtaacagcaagcagaggcccatgtgaggcccttggggctattgaatgtgctggctgaaagagaccttagaagccattgcatctaaatctgtcccttatacagatgaggaaatggtggcccagggaggttaggtaacctgataaagatcacacagctagtaagttcagagccagcatttaagccctggtctgtctgatctcagtactcgtgatctgagaaaacacacatcttgatgttagacagacctaagctaaaatttcagttcattcatttactagctgtgtgtgcttaaacacattattttatcctttccaccccttcccccacagctctagtgttcatctgcaaaggatttttttggtaaagatttaaaataacacacacacacacatacacacacacacacacacacacagagagattgagaatttggcatacaggaagtatgagagctgtcttaggccaggctccctagaaaacagagccgaaggtcaaatcttgcatgctaaatcagggagtgcaagtccacagacacagaggtgagggaaaggggaaggtggcaggcaggcggggagagtatgcagaaggggtgtgttagctgctggtcatagctttgtattaagcacagatgactgttcagcctgcagaggccctatgaaatgattgcctcactaaacagtccaccgcaaggagggggaaacttgtatctgtgagtcccatctctcactgactgaagttcataccacaggaagtcacctccccaacacttctaggctgtgcgcccagaccctttggccaccttcaaagaagttggttcccaagacactggtaacagcactcgaggtgcaaagcataaaatgtgggctgatctagcaagtgggtgagagctgtgaccctctccttgcccgcagccttgcctgcagctggatgcaccagtgttcttgcatcacagcagcccaaagacgcctcagggctggaggctcgaggacagggtgcaaggagtgaggtgaggcaatacaaaggtcagccagagcagacaccatgggccgggccaggccagcaggcagagcaccaccaaggcagtggcagaacctgctgagcctctctccagtgaagactggaacttccctttgtgggtcagtagaatgcagttggtgctgggtcatcttcctggagggttattggtaacaatgtggggaaatcctcatgggcatgcccaagcaaacataaggatgagctttggccccaggagtgattatcttagggacaccaggctgtctctcaatgccccttttcttgttcaagaagtatatgtttgctagtacaaagaataaaattaggccaattgtcaacagctgagagtgaaaaccattgtaacacattgggtaagcctaggatttcttcttgggggtccagggatcctgcccagacattggccatcttgcaggcatggcagctctccaggggctctcacttatgcagcacatgtggaacttggggaagaaagagaatgtgtacaaggatgaggtgccagggtatgtatggacagggctgcccaacagtttcccctggacaacaagcaaggtacatgtaattgaaactgcagcagaagcaatgaaggttgatataaaggagaacctccccaacaaggggcttggggttgaccaaggaatctctttctttggagagtttggggaatatggtgactgcctgtatgtctgagtgatatgaattaaagtgtagaggcccagggttatctccagtggaaattgtagagcctcagtcttttcacatttgttatcacctgcttacccaaaacagtgggtgctgtggtttgaatgtgtccctccaaagttcacatgttggaagcttaatctgcaatgcaacagtgttgggaggtggggcccagtaagagatgaatgggtcatgagcactctgcccttaggaatggattcatgtcatcatcgaggaaggttagttactggaagagcaggttgttataaagtgagtcaggcctctggtgcctctctctatcttgtgcactcacttctgccatggctgacccttaccgggtgacaatgccatgctcttgaactttcttcccagccttcagaactgtgagccaaataaatttgtattgtttataaattgcttagtctgtagtatcctgttacaacagcggaaagcatacagagaccatgggcttagacacacggccgtgtattcattgtggaggagaattcaagcatattttctgcatatgtgtgaaaatcatcagagcatgtcttttcctgtaatcccattaaaaggggaagtgtggttggagtgaaggcaagtggattcacacaaactgggccagttgggtggcctctcaccctggggctgtgtctgggcagtggagatgagaaggatggttgttcgagaggctctcaggtttgaatttgttttgcctggtcagctcctttgcagctaagcccgcagaaggactgagtggcagtgatgttgtatctcactggaggtgtgcttggcagagaggagacagactggagtagcttgaagaagcagatgccccaggactaatcccaggggccctctgtctcatgccagtacatttacatggatgtataaacagttttggtgaaactgttcaaggcattcaggtacaaagatgtctctagactcaaggaggccactctttgataggggccccattcgggtgagagcagggtgagaaggactatgatggggaagtgcagacagaatactggagaagggctctgaactctgcctgtgacacatggggaaggaccctgtgggaggtgatgctaggcctgaatctttaaggatgaagagacattggccatcaaagaagagacacggagagagaagaacatgccagtgaggagagagtacgagagccaagtcatggggccatgaaggtgcaggggtagattccatttcagcaaccacacataggtgggtctccctggaacagaacatggtggtgagggagtgtggccccgtgggcagctgtcattgatgaagggcctgtttgagctgcagcatgaaacaagcgggcaggagggcaacactggaggcaggggagccgggaagaaggctttcactgttgcaagagatggtgagaaccaaaagtagcttgggagttagaagaaggtacagattccaaaattctcttttttttttttttttgagacggagtttcactctgtcacccaggctggagtgcagtggcgcgatctcgactcactgcaagctccgcctcccgggttcacgccattctcctgcctcagcctcccgtgtagctgggactacaggcgcgcgccaccatgcccggctaatttttgtatttttagtagagacggggtttcaccgtgttagccaggatggtctcgatctcctgacctcgtgatccgcccgtctcggcctcccaaagtgctgggattacaggcttgagccaccgcgcccggcccaaaattctctttaaagataataggctgggtacggtggctcacgcctgtaatcccagcactttgggaggccgaggcgggtggatcacctgaggtcaggagttcaagaccagcctggccaacatggtgaaaccccgtctctactaaaaatacaaaaattagccaggcgtggtggtgcatgcctgtaatcccagctactcaggaggctgaagcaggagaatcacttgaacctgggaggtggaggttgcagtgagccgagatcgtgtgccattgcattccagcctgagtgacagagtaagactccatctcaaaaaaaaaaaaaaagaaaagaaaaggtttttctcttatacggaggtagacatgctttttgaaaaatagataaggttttaaaaaactaaaaattatttgtaattccaccacctggtaatacccatggctaacacttctgtatcatgccttctaatttttaaatgcgtatatgttttacacaagttctttttgtaaaaatgggattatactatatgcagtgttgtgtaacccattaaaaactatttaatagagaaatcatcaggaccaggggacccagtggatgtggaatgtgagagagagggagaatgtaggatgactcaccagtttctgacttggacatacgggtggttggtggtgcccagcaatgaggtagaaaaacaggtctgggaggagagagaggatgcatttagctttggaaatggtaagtttgaggtgccttttggatatctacttagagacgttcagcagagagttggctagagtgggcttcagcaggctgaaggcgtagactgtagggtgaatggatgggtgggtgcaactgaagatatgagtagggaaggaatctttcagggaaaagagcacatgttcaagagggaggaagacgggagcccgtgaaggctgctgaaagagaatgggtaaagaggttttctgccgcttgaaaggaagtacagaagaacatttcccaggctgagcaatacgggggtcaccggcaaatgcagtttcagggggtggctggattgaggtccaatggcagtgattgaattgtgaacaagaagagtgagcagaggagatggagacagcagccagggaatactcattaaagtcatgtagcttgtaagggaaagcaaggtaaagggttgtagctagagggagctgtggagattgactgtaagtcaagatgaaatcgcttatgtaagcagctgctcagaattgagaatgcttttcttatggattggggaaatgcagggacgttcatgtggctggagcaatattggaattggcagtgtcagtaaaaggtaggcgggatggaggctggagatgatggagcattcagaaaagggttttggagtttttgtcgagatgctagtacttcttcccacagctggtatctgggaaccagcacagtcaggcaagtatctgtctgggcattgtcttaacctcttgacatttgggcagtgactgaatgtctataaactgctttcacaagcattagctctttcatcctttacagcagcactgtgaagtaggtattattatccccattttagagctaagcaaactgaggtttcaaagaacaaaatgaaccactgccagttagtggcagaggtctggtgaaacttaggcacctgagaccaagtccatggcagcacacggtctttccctgcagaaattacagcctcatctccctgcagccacaattggcattcacttctgagatgtccttccagacagaggatgtggagggtgcccagaatttgatacccaagttcaactctggcccataaagagattgcactccatctgtaaagtgacagaaccagacagatgacttccaaggccccttctgcttggtagggaggcattcttggtcaagtactgagctgtagtaccctggaaggtacaacagctgcattttccatcctcagggccctgcttgggagagagtaaagcacatttgggaagagacagagtccccctctaggttcacagttcagaacaaagtaccccgttggcattcaactccatgttggcggaatggcacatttaagttcaaagagaaaagggctttggaaggcttagattcaaggctcataagccttggacatcaaatagctcttaccaatgacattttgatgaattaagtgtaaatgaagctgaaacgcctcattccattttttctcctgggtgcccaggagaaaggattgtggagggagcttcccagaggcctggtgggtcaggctgttcgtggcctcaattcactgggaaggttgtccggagacattttgctgaactaaaaaaaaaaaaaaaaaatacaagtggtcccctgagattacttttcaccttgaagccagagactattttaactacaaataggtcacagaattctattcagcattctttaaaataaagatactgatccaggggccaaagtggagtgttccactccttccccgtgtgacagccgagctcagcgagggctttgctttaccttccccattaaggcttagtttctgcatttatgcaaatctgaaagagatgagcttctgttataattcaaccattcattcattcatcaaagtgcgtgctgtctgacaagcaccgcttggatatgaggaattgcctgtaaggagttcaggatctactcaaagagacggacaggtaaaccaagaattactgtacagtgtgacacatgctatattaataatagttataatgatggtaataacagcagctgacaggtatgaagtgcttcctatgggccaggcactgttctgagcacttgactgtattaactcaagcctcacaataactgaatgtggcaggtgaggtggcaaaacagttaaggaacctgctcaaagtcccatgagtagtgagtggcaggggtggctttgacagaagttgagcgaggtgtggtacaggagtagggaagagctcaccaaggaaatgacgagtgagcagagcactgaggatcaagaaggatcgccttggcagaaaaggatattatattctaggtgaggtggacggtgagaaatgtacactgcagtgccgttggttctggacaactggagccaagcatgagagggggtggaggagaacagggctgtaggcaggggccagtcgtgatagggtttatgtgtttggatctttataaactatgtccagagcgctagtgggagctgtctaagagcaggtggtttgtttgttttattcaaagaggggagtggcataattgcctttggttccagaaggttactctagcagatgagagggggacggattggaggtgggaagaccagatgcaggtttactcattagacagctgtccagtgatcaggagaatggaatggggtctgaattaagcagtgactgtgaggatgcccaagagaggattatggctgtgtggggacttcagcatttgagtctgggacccagtgagtgcagggagctcccctttcctgtagaccttcaagcatgggttaaggtcgtcctgcttctcaggggagaagggattggctgtttgaccctgggaaggtcctttctacaatggctccttgagagatgcatgccacatagcgatccctgcatgcaacccactgagacctgggaagggaggaaatccatcttctccagctcattattcacagacaggtgtacttgaaaataaaggggccagcgcgctggactgcaccttagccacaaacatgttcatgcactctctccacaacactctgcttcattgtgagttcccaaaaggttcttttctgtcagtaggagtcctttcactcacctgagaaaagggcaataatggcagtttcgtgactgcagccgccctttttttcttctgagatgtctgtatcggctgccaggctgcggctgggctctcccatctcatctccctctctccctctgatggcctccctctcctccattcaggagtgaggtgcgcacaccccagaagattgccgctgggcctctggagccgcagctgccaaccgtgcgagcccagccaatgccctacctgcgctcggtggagggctctgctgtggctttctgatttgccctgtcctctggcttcccttggcttatagggggtctgaatggggatctcatgtgctccagacccttgctcacatgtcttcctagttcaaagccgagccaccaggagggaagggagtagaagcagggtgctataactcctgacaaggccagacaccatgtagaagctctacactcatgagttaatttgatccttacatgacccatgagacaggaattattactctgttccacagatgagggcacagaggcttggagagttccataattaatccaagctcagacacacagcaagtggccagagcccagactcagaccccaatcttgggctcttctcactgcaccaaaggggcatgtgagaactggtgtctggaacaaaggatgacttgggtggcatcgtcttgttctctgcatcagcctcctagaagaatgaggaggaaggaataagttggcccaggagaatggtaaacaaggaggtggctctgagtggccagtttgacagggacatttggctgacacttctgtcctcaaccctcttatctggaaactggacttcttatgaccacctcgtttttcagactaagaaaacagagccccaagaagctaacgcccaggagtgctaggagttgaagtcaggtccttttcctctaggagcctttcagctaaaaaggcagacagatgcgagcagaagttattttaatgaggtcatacaggataagtgctgtattagacatagcaaagtacatcgtaaatgactaggaaggtaggggcagaaatgacttctgaatcgggacaaccaggatggattcctagtggaagtaagactggcaactctttgaaggaaagtacaatgtcttatgcatcttgacatccttatgcacctaacacagtgcctgaaacacggtgaagtggtaacataggtaatactaggaatctctagtctgaaaatccaaaatctgaaatgctccaatgtctgaaacttgttgagcttcgatgtgataccgcaagtggaaaattccacacctatcctcatgaagggtcgtagtcaaaaacagtcaaaactttgtttcatgaacaaaattatttaaaatattgtatgaaattaccttcaggctacgtgtctaaggtgtctatgaaacagaaatgaacttcgtgtttagacttgagtctcattcccaagatacctcattatgtttatgaaaatattccaaaatctgaaaaagtcggaaattcgaaacacttctggtctcaagcatttcagataaggggcgcttgcattcccctagggagtgcttccttcagcaggtttgcatcaacccaaggcttagaaagccaggctttccggccaggtgtggtggctcacgcctgtaatcccagcactttgggaggccgaggcgagcggatcacctgaggtcaggagttcgagaccagactggccaacatggagaaacctcgtctctgataaaaaatacaaaaattagctgggcatggtggcgcatgcctctaatcccagctactcaggaggctgaggcaggagaattgcttgaacccgggaggcggaggttgccgtgagctgagatcatgccattgcactccagcctgggtaacaagagcgaaactccgtctcaaaaaaaaaaaaaaaaaaaaaaaaagaaagaaagaaagaaagaaagaaaaaagaaagaaaagaaaagaaagccaggctttccatttatgaatcaatcagcagacagtgatttaacacctatgtgccagtcactgtgctggggtgtggggtaaaggaacagatcaggtttggttctgtctctgaaagcttacagaccgggcggtaaaaggcaaggggggcacaggcatgtaagataataaagtgtaggtgtgagtacatggctgggagccccgagcagggcaggactaaggaatgacatcggagcgtcacccgtgcaggtgcgctgcttaaatccctgtctctgggagagcagtctccaggcccagagacagtcagccacagatttgaaacagacttcagaattttccccgcccatcctcagatccctgtgctggttattttccatggaaggagttgcccggggggatctggaagggtttggagttcagttaggttcagtgctcccttagcagcttcctactgggagctccttcaaaccccattgggcatctcaaagcagcctgggaaacttatcagttcttgggaattatttccaccttccccactgagcgccagctgttaaggggagtgaagggtctgcaaaggaaatgaaaatgtattaattaaggcatctgaaagccttctaagagatcagcttgctgctaagcagaagagacaggtggtagggaattgatttgggtcagagacaggaaaggaagctacagacaatgtgatcttaatgtcttctaagaattctctagtctcgattccccagccacacagcagagatgaggatgttacctgtgggcttggccagacaccagactctggtctgagaccagggaggctttcaggagctccagttcagcacgcagggaccaagcctcctctgccttgctctccttcccacccagactgagaaatccagcttctgatgattccccaagcctaagtctctgagcttgccaaactggttctctcactccccttcccctcaggagtaagaatcctattcctgaacccggggtgacaaccctattgacccattctgatgtacttaccatcctcagccagtggtgcctgcctctagatgcattgattccatattggttgtgccttcagcttttactttcatagagttcacacagtttttactttcatagagttcacatcctgtatacataggacctccatgtatggtttgtgcaggttaagacatggtgaaggaggaatggggtgtgaaacccagccctcactctgctcaccaaacacgtgctctgggatgggggggtatctacttgtcgatttttttcctacaaaaatgcctttagcttgccaaggcatgtgcccactaagtctgctcagagggccaatctttataattcatacaacgtccccaactgtactgggaatgagacccggtgtataagttagtttgagacgttagcatgtgatatatacaaaagggaatcctacgcaaaatggtatgggagcacagagaaggagggaagcatttcagccggaggaagccaggcaaggcttcagagcagagctaatgagaattgtcgccagtgtttattgaatacctactacctgccaggcatttatcatgcatcatttcctctccacataacaatcttacgtgataaatattattattcatatttcataaccaagatgccaaggttgactttggcttaacagagaaggccaaatcagggtcacacagctaacaagtgattgatctggaattcaaagccaaacctgtctgacatcaaagcccacggtcattctaaccactgcaatgcctctcagggaagtgccgtcaagtcagaccttgatagacaagtaggaatttgacaggcgacaaggaggagagagttgccggcagagggaacggtgtgaggtctgaaatgtatgccaagtttaaggaacatgaagagtgcattgtgtccacatcgcaggctgaagagaggtcagcagcttaaggtgatgctgaagaggcaagcctcagctgggtggtgacaatcacttagaccatgggaaggagctgggactccattttaaagagagtggagagtaactggagtttttaaagaagatgagtaatattagatctttggtgtaaactttagagcagcggttctcaaagtattgtccttgaacgagtagcatcagcaacacctgggacttgtcagaatcccaattctggggccccatctagacctacttaacctgaaactctggggtgggactcaacaatttgcaacttaacaggccctccaggtggtgctgattcgagcttaggtttgagaaccactgattcccaatgctgcttgagtctcagctgagtggatggatggcgtgggaaagaactggaagcaaagagaccagtgcagaagctactgaataattcaaaggaaggctttaatgatggtaggggcagtgagagtcaagtggtggtgatggattcaacaggcgtttcagaggtaaaagggatggggcctggttattgaatggggagacaacagggaagggagggagagggaagactccaggctgattcatggtctctgggatgacggatggggaagtcattaatggcacacagggaaagagtagctttagacggcagagataaggaattagacatgggtataggaagtcagtaggtagggggagtgaggaaggctggcaagaggcagcactgggcctgaaccccatttggaagttgtcagcatacaggtggtagtaaaatgggaggaatgtgcccacccctgtcctcacactgccttccatcccgactggacacctaggtacaaatcgctgctctgccagctatgagctgtgtggacttggacaagtctcccaacgtttctcaaccctggtgtcttcaccctcaaaatgaaaataatagtacccacccctggattactatgagaaataaatggaatataattcctgtagcgtgcctgcactttgtggacgctctgtgagtgttcgctctctcctctccttccctccccacgtagggctgtattttcacctcctcttctggcctggagctcagctcctcagcctcacccacctcggtccccaaacacatgcccatctacgtgcatgtctgcctgctcccctgggacatgctcatccaggccccagtcttccctctcccaggccggcctgggttcattcctcttgccatgcagaccacagcagcgtcattcatcaacacagagtgcacatgtgtccagtcttgatcctactggggagaggcccagcagccttccaaggttatatgcgctgttccaacctactctcttcttgccctcacatattccccccaggaggtgggggtgtctgagccccctcttattaggtatccaggcaatggcagtggtggagcacccactagtcctcttgggcttagagaaatataattttgagttggaagccagggtctgtcccagaaccataaattagtatctgaatcttcatgggctaccatttgctcacatcttcaatgagcataaacatttcctctatgccctgcctggcaccagccacaatttcaccagtatcccttccatctggaagaactaatccagagtctacatctctgcatctcccctcaagtgccccacactcactggcctcctcttggttccttggacacagcatggtcagttccagcatgtggccttcacatttgcgccttcttctttcaaaaacctgtctcccaaatctccagtctatttccatttcattatctctgtctaagcctggcgtccccttttctgagacgtgttctttctctgccaccctgaaggacccccatcctctcatttagtcaccttctaccacattaccctgttttatgatcttcaaagaaattattactgtctaaaaccaccttgcttattatgggactatgtgtttattgactgtctccgctcactagaatgtaagtttcctgaggtcaggaactatagctgtcttctttatccgtctattggcagcattcagaacaggctctggcatatagcactcactcagccaccaggggatgggtggttggatggatgctgtaaaggcatgtggaagagaattaaccatcccagcgttgatgccaaagcacttggagcctggaacaaagagcccaatgctggggaccagttgtaggttttcggaagatccttttgctaacagggaaagcacagcagcagtccaggtgtaccggtgcgtttagcaggttggggctgcaggaggtggctgccctcccgcttgcgcgcacttcctgtgatccctgcctcccgctcctgcctccaccctcctggctcccacagctgggcctccagctcacaccactgcatgcgcggccccatctcacttcccagggcagtattatcttgagaaagaagaatttaagcatcccttgccctccctcctctctccatggggtggggaggtccagggggagttgtctgactctaggattgaccctccagtctccaattttgttctccaagttgcagcgactccttgcttcattctttaagctttaaacctaactgggtatcggtgcagcccctaacacccacacatctatggtccaactgtctttaggataaatctgctctatcaagcttgcaggctttctttcctgaagtatgtgtgttggtgaggtgtggtggcagcaggctggaggtcacagagcaagtgcccaccccacccatctggacttcggagccacctcacccagactcccaacactgtgctcaactcccgtggctccctatgtcaccttctgtgcctgctccacagatagtactagcctcattactgtgtgccaggaacaatacttgctttacaaatgttctcctatttaatcttaggacaacattacaagggcaaaagtatattgcccccattttatagatcagaaaactgaggctctgaggtcaactaacttgttcaagatcacgtggctgggaagtggtagaattaggattcaaattcagatgggtcagtgtgttctcctgactgctgtgcagagctgcccccagcagttgccacctctcgcttatagggtggtacctcagtcaccccatcctgctgcttttgctccctgccctaccccacagctaggccctgctcatcccttgccttcctgtgaatagatagtcctgcttcaaagaattccaaatgtggcacctccttctatcttccctctgccctctggccatccctcaccagaaggtcttgtggtgtgttcgatgtgcgtactgcctggcttggcctcgccaactcacagttcctggccagagtcattatatgctctgggagcttatttacagatgatttttcttgccatcctatagcttgtcaggaacaactgacatcctcccatttgtcagcgtgagagccaggcctggcttagttgtgccgatggcggtgtcggcagctacagaggcagccatctgagagtcctgttgtattacacccctttccagaacctatggaattattccttatcttatgcagccttcagataggctgcctcgcttgatgccaagctctggccctagctgtgtctgcatttgctcttgaggcaacaatgcaaaggcccagatccttagaaatagcagcatgtagtatggtcgatgcatttggactgcactgaaaggcattgttgactcttgccagacagatccctatccagatccaggagacaccctgcacggacctgccgtgtcctaggtggcgacagaacagtgggacagaggcctggctggctgtcagagggtggcaaacagtgggacacaggtgggagatcaaaacagatgctaggtgtggccggtaagtccagcaagtgtgcaagctggggttagtctggccaacaggaaaggggagttactaggagcaaatcagataggagggctcagccttagaaaaacttaccaggtgggatgttgcggcccaaagcagaggctggatctctggggctcgtgcacaaaggatggagacaagatgccagaatcaggaacagcttaatagaagaatagcaacgaacacttactgagcacttgccccatgctaggcccgatccatttgctcatttttttttttttttttttttttttggagacggagtctcactcagtcgcccaggctggagtgcagtggcgcgatctcggctcactgcaagctccgcctcccgggttcacaccattctcctgcctcagcctcctgagtagctgggactacaggcacccaccaccacccctggctaatttttttgtatttgtagtagagacggggtttcaccctgttagccaggatggtctcgatctcctgacctcgtgatccgcccggctcggcctcccaaagtgctgggatcacaggcatgagccactgcgcccggccccattcgctcatttaatcctcagaataaacccgtgaagcggaaactggtaccattcatactttactcatgagaaagcaagttcagagaggctaagtaacttgcccaggatcacacagctagccagaggcagacttaaacccaggaccctctgatggctctctggcctagtgtcagattctggtgggtagttcatccacccagcacactgtcagggcatcactgttgaatctaggacagactggtccctctcccctgggctttaggacctctagggtgatggctggcaagtcctggggggcgattacagctcccagcagggaggcaagtcttccccctgggctttgcctggtgttcgcagcaggcagagttggctcctctgggaatttcacaatctgttaagctgtttgtgccagacgaggaatctagactcttcttcatccaaatgagaatgaaaatccatgaaaacatccagatgtgcattttaccccttcttgaattagaagccacccagatgtgtaaagagaggtgcacaggaggttggccaggcctgagtgtggctcccttgcgtgtgtgaggtcaccgctgtagcagtcggtaccgtggcagcagccctggctccccttccaggctcctcaccacagagtcagcagagcgtttagtggcaggctcaacagtggccattctcctacttgggaaaatcacttaacttaaaaaaatatatattgaaatagacatatagaaaagtgcacaaatcgtaagtgacagcttaatgaatgatcacaaagaggacatccctgtgtgatcaatcactgtccggatcaagaaatatacccttagcggcatcctgaagacccccttgtccccacccacctctttcctgtttcactctctacacctttcgtctgcccaaaggtaaccattattccaaatttaacaccacatgacttcttgagtctcattctcctcatctctaaataggttactgccaaccttagacgttgctgtgggtctcaagaacgatctgtgaaaaaacagttttggggtatgactattgatgggcatatgagccatgtcaacaagtgggacacctctcagaaaaagaccaaatacacctttatcacccaggaagagtggccagaggttcagaacaatgtcttcagctctcttcctcaaaaaatggcagggattcctgagaaaatgccctgctgccctttgcagtggtttcaacgtgtgcacatactgataggaaatgagaaggggccagatgctgtccactttgtggatccaattggtcacatcactgctcactccctggggaggtggggcagttcagggctggtctctgaggcagagctggggcctccattctgtctagcaggagctgtaggggatggggtgaaaaagtgggaacagagaaggagcacagggaaggcctctagaagttctctatggctgtgggcgatgctcacagaagttggtggtactttattttacccaacaaaaacagtcctaataacaggcccgtgaatctcaccattcctaattacagggctgacaagtgggagggaaaatgaaaggaagacagcgccgtgagctggtggcactgtcgggctcctacaacagcagaaacctgtcgcctgggcttgcccaggccagctttacacaggcccccgatcacgcctggaacccatagcctcgaaataagtgtagggctggctaggccagcacaagcccttgctcattagttcaggtctgcaggttggatccccatgtggaccagttagctttgcccgttgtcagcgacccagagcttaaccagctgttttggcagccagcagggatgggagacaggcagaagagggtggactcactggtgaaaattcagtgccccttgtcccatggcctattggtgactgtattgtgggccagagatttttatcaataaagggtgcatttgggttagaaatgagcatatcggccaggcgcagtggctcatgcctgtaatcccagtactttgggagactgaggcgggtgatcacctgaggtcgggagttcacgaccagtctggccaacatggtgaaaccccatctctactaaaaatacaaaaaaaattagccaggtgtggtggtgtgcgcctgtaatcccagctactcaggaggctgaggcaggggaattgcttgaccccaggaggtggaggtttcagtgagccaagatcgcaccactgtgctccagcctgggcatcagagcgagactccatctcaaaaaaaaaaaagaaagaaaaaaaagaaaaagaaagaaaagaaatgagcatatcttcctgaaaactcagataggattcaatttcttttcttgattcgacatgtaaattgttggtcaatcttcagaaagtcaggtgtgatggtggtggtagtagtgatgtgaggaagtgaaacttaggcctctctgggctttgccacataccataacctgcctggacctaagctctcagttccctttctctttcacacctcaactatataaacactgacatctataatgcatattagttttttaatcatgggatttcttttcactcccttcaatacctacattgaattttctgaaacaataattttaaaaaataaataaaattgaagtgaatcctttaagttgcaacaaaataataaaggctgacacttctggaacattccctatgtttcaggcactgttctaagtgctttttgtgtattcattaatttaacctccccaacatacctacaaagtatgtaatattactaaccccattttccagatgaggaaactgaggtacaaagaggttaagtaactggcctaagattatgcagttagtaagtggctgagctggccctagagggtgtacccttggtcaaaacattctactacaaaatcgttccctcagttgagagccaaggatagagaataatgttaactgagctcctctttcttggatttgtctattcattcattcaatcatgacttcattcaacaaatatttatgtagtgcctggcacatggcaggttctggacactggagatgtatgatgactaaggcagacaaaggtcactccttcctgaagatggcactctagacaatcaacaggtaaactggtaaataaacaagacaatttcaggtcatgatttctgctgtgaagaaaataaagcggtataatgagccagagtgtctcgaggagaggggcccattaagtgggcaagtagggaaggctgcattgatggcatggtgcttgagctgaggtcagaacggtgagaagccagctgggccatggccagggcagagcatatgtggaggggaaagagtaaactccaagaccccaaggtggaaagtgaacttgtcatgttcagaaatcaggatgggggttagcatgactagctagactgtggtgaatgggctgccgtatcaccaacgcctggtgggccacggtaaggagttgggactttattgtctatgaacttggaagtctctcggttcttttcctaggtccacatacacccatggtctgaggatagcattgagagtccacaaaactagaaaggaagaattggccgggcacagtggcttacacctgtaatcccagcactttgggaggccaaggcaggctgatcacttgaggtcagaagttcgagaccagcctcgccaacatggcaaaacccatctctactaaaaatacagaaattagctgggtgtggtggtgcgtgcctgtagtcccaggtactcaggaggctgaggcaggagaactgcttgaacctgagaggcggaggttgcagtgaaccacatcacatcactgccctccagcctaggtgacaaagtgagactctgtctcaaaaaaaaaaaaaaaaaagaaagaaagaaagaaagaaaggaaaaattaacatctatatatttttctaagttcaaacagaaatgtaatatttccttcaattatgaatgtggtcaacaaagcttcatggtattaaccacacctgtgactttgtcaccaatggtattaatttagtgttgctgttagacacacttccagctcttgttatgtaaagaggcacagataccactatagcacaaaaagtgtacacatattttgataactgaatttctatgtagtcattttaaaatattttaaaataagaggttaacaggtatcagcagactgttaaagaggtccatggcataaaaaaatactaagaaggcaggccaggcatggtggctcatgcctgtaatcctagcactttgggaggccgaggcaggcggatcacctgagatcaggagtgtgagagaccagcctggccaacgtggtgaaaccgtgtttctactaaacatacaaaaattagccgggcatggtggtgcacaactgtaatcccagctactcgggaggctgaggcaggagaatggctggaacctgggaggtggagctgcagtgagccgagatcgcaccactgcactccagcctgggagacagagcaagactccgtcttaaaaaaaaaaaaaaaaaaagctagaaggcgacacggagaaaaatggcatcgtctgctttagctttcccaaagacccctctggctgcaacgggaagaggggattgtaagaagcaggacctcacatgagctctgtttacacagggagttgaatttaaccctcaccacaatcttaagaagtatacattattttgcctattttagagatgaggaaactgaagctcagatttctggtaattgctcagctggtgaatggcagagtcgggattcaaacatgcatctgcctgaccccaaaaagcaagaggattgaggattcgtgggccagtgaatagaagcctgtaacaagagggtcaagggtaaatagtatctgcttggcctcttgagtcagcttggacctctgtgccgcataatttcacctgcaaatgaactgccagccccttctttccttagcgctggttcgttcctaaaatctgccctctataggccaataacacagccctgtgccgagccaactaaatatttcatggggactttaatttaactctaaagaaattcatccagccccgagagtaagctgtaacctcgagaaatagcaccagggagcacttggacctgcggatgacattgccactttcccaggaatgctaatgctccactgggcctctgcctcttcaatcattgctgtggataggcctggcccagtgagcagggatgatttctacaaacatgggctcgcactggttagcaaagacgtgtgtgtgtgtgtgtgtgtgtgcgtgcgtgcacgcgtgtatgtgtgtgtgcgcactgtgtgtgtgtgtgtgtgtctgtgtgttggcacaggtgaacaattgggtgctatttactgttcctttattccctgatctttgttcctatatcctggttctgaaagaagggagaggtggtggggttggcatccagtctccccagtggacaaggacaccaaatattttgcaggtgccatgtgacccctaagagtttctctttgtctccagcccgcggcgggtggcgtgggcagacagcctgactcatgtggcaggagagcagatgtgtgtgttctcaggcatgtgacgctgaagtctaagggatgagccctgcggatgctcgtgtgggccaggagtgggagtgagcctccctggctccttctgatcccattgccctgcagctcggtgaccccagtgagtcctggcaagttccctgggcatctcaataggtgcgggtgggagggagaaagccgcccgcaggtaaactgatcaaaagacaggaagtgagcagataatctaatttgaaatgggctgagatacagatgttattctgctcaaatgcacagcacaaaaggactggggcctggggagaattgggaagcagctccgtggagccagtcttctggcctctggctcagcctgggcctgtcatctccattccttcccgggctgtaattaacacccctccgctgatagctgctttaagccagattggagcatggggcccttcctcttctggttgggcgtcccacatgacaccgtccaaggtgttagagggaaccgggtctggggcagggcaaggggagaagggcgccctctagtggggaacctacggcttcaagtccttaggttggaggatgtctgatcgcatccacagcatgacctgaatctggttctaatgttccagcctcctgacaaaaatccctcctgcatacaggcatctgtcagaaatcagcctgcttcagctgccagcaagaaggggctcgagggcaggccacgtttggggggggggtcccctccttacccacgctgttggctgcactggctcttcactagggactgactgtgtgccctcttggggaaagtcactgcgaacagtgcagtaataagaaagccaagcgcacagtcctgagaatgtgtacatgggggtctgaagctagctttcttcatgtcctagctgcgtgtatttgagcaaatgatgaacctctctgggtctcagcgtctttgtctccaaaacagggctaatggcagttttgaaatgttgtttatgttaaattttttcaaagatttgatccctgcttcaagaagtttatctaatgtagagataagatatgcacacaaatgtaaacagcagtaatagtaagagctaacatttattgtgagttatctgtgtcaggcctaagctttgtgtgggttgctcatttaattcccatagaagctccatggaggtgggaactatcattatccctactttactgatgaaaaaactgaggcacagagaagttaaggtcacgcagctcataggtggcagagttggagtgtgagtccaggcatcctgtactaatacaaggaaatttatagtatatgccatggtgggtggcatgagcattgccttctctctttggcgacagacaagggagggcttatgcctgagaagatgatcagagaaggttttatgaggatggtaaactttgaatagaccttgaagagtaggtggagttgatgtttggacttttgatgtggagtaaatataactgcagaaaagtacaaggtgtgttgagagccagctgagttggcctggctgcaggggaggggcagtgtctgggagaggagtgatggagatggggctgaacttgcaggagtaggcagaccatgagggccagactcccacatgctggactgcagaggagtgggagtcgtgaataatttcttagggaggacaggtatagttgctgtggtgcgtaagtgagttttgctagaaatattgagcacccgctttattccaggtaatgtgttttgtgcattatatgtattatttcctttgtcctcataacatctctgaattggcaattattatccccactttacagataagaaaaacgagctgggagaggatatcacagctatctaaggtcacactgttagtaactggcagggcgaggacttgaacccagtttggcttggtgccagtgacccaggcaatgtagtcacaggtcagagcaggtggagggaagcagttatgtctttgaccttggccttattaggagggcccctgcagggactggagagaatggcaggctaggaggtttggcaacacaaggacttaggcaccccttggttattgtaccatggaggtcatgctgaccttggctggagtgatattggtggagtgatggggtggagaccagagtgcctggagtgtggtgatatacatggcaagggagtgaggagaaaaatgcagagggccctttcttgcctcccttcaatctttttcttcactagagccgattgaatgtgctgcatattcagcatgcagactctgaagccaaattacgtgggtttgaatcctggctctgccacttacttgctgtgcaaccttgggcaagttacttgacctctctgtgcctcagttttctcatctgttaaataaggataataatagtaacctatctcatagaggttttgtggatactgagtgaggtaacatgtaaagggcttagttcagtgcctgatacataggaagagatatgtgttagctgtattgatattacaagtccaatactgtaggacattcactgtagaaaatacttcaggaccttctgattgctgtctggttcattgcatcctctgctacctgcctgcctctccagcctcatcttacagcatgctcctggccctgtgtgttctagccactctggccttcccacagcccctgaaaagcaccaagctccctcctgcatcggggccttgacacatgttgtaccttctgtgggaatactcacccaggccttctcactggtccctcctgttcaggcagctgagtctcatctggggaaaactcctgtggaccttccaggctctgcccaagccctgttccaccttctcatggtgacatatataacccccctataaacacagcacacgtgcaattttacaatttttttttttttttttggcaatctgatacttgttcgcctcctctattggttgtaaattttttgctgtcagagactgtgcctgtatttgttcaccatagtattccagcaccttgcacactgcctggtgcagggcagagagtcagtggagagctgcaagggtacactgagcattagagaggaggaaacaggcggggagggggcattgggctctgcaggcagtccccgcccaccctgaatcccccagtgagctcagcagccccatgttactctcggcccatatcctcatccagagccaaatgtgcattatccctcccaggaaagccaggcttgctaggcacagagctgcttcctatctgtgtgtttacagataatgccagcctcattttcacagcctcaggcctggccttgcttggaattccataagccttttcaatatacaggggatctccagagacaattaccttggaatgaaggtttccaggagtgcttattctgggtagcgttttctcatcccaactgtagcctcccaaagctttccggagttaagtaacacaattacagagttaaatgacattgaagaatgggaggcactctgcagccccagcagcaggtgaaacaggagatgtgaagcctgacttgtaaagttgtagaaagctgctggcatgtagagggggcaggggcagctggcctcctcaagggcagaaagctggggtgaggaggtgtactgtaaaaaggtcagagaagaaagatctggaagctgatcagagatagaagagaggatctgaaagaggattcagagggagctggagaggccatttaattcattctccccaaaggagaatcatgtttggaggaagggactggggagaatgactggctttccaagctaggtactggatttttcccagagttttccaaaggactggacagcatgaggtctgggaggcctggaccccacataggtccacatagacagacggtcacaccagagaagcacattgtgtcaacacagctgtgcatgtgctccaggtcacccgggaaaggccgcaggggccagagtgggggacgcggtgaccagttagggctgcacatacacagaacaggtctgcctgcctccaaacatgcccacaactcatcataaggtctccataagcccttgctaagatgatcctcattgtcaagttcagcagcagcatcattgtcatcccaacagcaaagacttactggctacttacttcaaaccaggccccatgctcagcatttacagacatggcctcattcatcttctcaacaattgtaggagctaggtactcttattatacccgcgttacagataagcaaactgaggcttagaaaaagttgaataaatgacttgtccaaggtcatacaacaggtaagtgagtgcgagtccaggtagttctaagccacactgaaaactaagttcagttaccccctctactgccttaatagccccttattgatatggcagcgctctacagtgttatgatttataaggctcttctacaaccatcatctcttttgactctcacataatattgataggctggtattgccccattttacagtggagaaaaatgagtcccagagaagggaagtaaattgcacatggccatttggacggcaaggagcagaggcactggcagttctcctgacccgtcccatcctcccattagcatggctgtatgtaagggagggcagccaggccaggtggaggaggcaggcctgaggctgcaagaggtcatagccaggcgcggtggctcacacctgtaatcccagcactttgggaggccaaggcgggtggatcacgaggtcaggagatcgagaccatcctggctaacacagtgaaaccccatctctactaaaaatataaaaaaattagtcgggcatggtggcgggcgcctgtagtcccagctactcaggaggctgaggcaggagaatggcgtgaacccgggaggcggaggttgcagtgagccgagatcacgccactgcactccaggctgggtgacagagcgagactccgtctcaaaaaaaaaaaaaaaaaaaaaaaaaaaggtcagcgtcatggtgctagggcactgctgagtgggagggagggaattttgcccgaaagggggcagcagctgtctgaaaaagaagggagggagatgagaaggctttgctgtcttcggatgctcccagatctggtattgccgttagaccactcctcatgccattctcaggaagcccggagtgggagcagggggcccaggcagacgcagaccacagccttattgtgaaggctcatcttcctcccagccaggctcatgtcccaggagaagagcagtggccacgccaagccttcaggctttgacagaaatggtggcagctgcacggcccctattaatctccaggaggccaaagagagtatgttttggaagtcacctccaggctggctcccgcctgccctccccttgtaaactctacaaacatccaggagataaaagaggggatctctcagaggcagaacacaaagctcttcaaagaacactttcagtcaaaaatagggagaggagagaggtctttctctcggagggaatgtatttatatacccctgtgggggcgcacatccgccccatgccacagccgggcacatgggatgcgtggagcactctctgcttcccttcacctgtccttttctttctccggagacctaccctgtggctctaatggtcccagctttttctggttttccatcccccctgggttacgattttagacctgccttccccagatggccccttcctgaatttctttccctaaaatcaaatgtccctgctagctgctgctcttcactgacgagtctggtcatcagtttcctcctcagagcgttcaatactgctgaccgccatcatccacttaagcaaagtggggaccactcatgtaagcgctgtctcttctagtcaggcacattaaagcaggggatttgacagctggaaaggagcttagagagcctctgcttgaaccctttcattttacagttgaggacactattccagacggtggaataatttgcctaaggtcgtgatgaggttgtggcccacaagtgacaagagtcagggctgctttttggtttaaaatgttaaaactttgggaggccaaggcaggtggatcacctgaggtcaggagttcgagaccagcctggccaacatggtgaaaccccgtctctactaaaaatacaaaattagccgggtgtggtggtgcacacctgtattcccagctacttgggaggctgagacaggagaatcactcgaatgtgggaggtggaggttgcagtgagccaagatcgcaccactgcattgcagcctgggcaagacagagcaagactctgtctcaaaaaaataaaaatactaaataagtaaatattgtatttactttgaagcactcagaatgtcaaccaaacagctgcaacctttttgttgttgcaattacagagtggtactcagttaacggaacgacagttatcatgtgtaagcttcatcggagtcaactaaagatgaataagccaccacccccatacataactaatttgttctgtgcaccaagaacctgctttaaatgtttgtgccaacttacaaccccatactgtgccaggcaaggttagtggccattaaaaataccaccaggacagggttatctaaagacacattcagtagtgtgttaactatacaaaaaaaagacactgtacagttaaaaaacaaatcctacgtagccttacattttacttattttcttcaaaaaggaatgggttgtgtatgggggggtgggtgttaaatgcttgatatacaagaaaaaatgctctagaaccaacttcgtcatcatcatcctggtcttcatcttcttcatcttcctcctcctcctcttcatcttccttgttttccgcctcttccttttttttccttgcttttttcagccccgataacttgcttttctgctgcatcggactttcttttagctcagtttgcagcaatatcctttggcatttttcctccagcttcacagccctcttttcatatggccgctagtcatctgccgccgtgttagtccacatcttccagctcctttgcaacatcaccaatggacaggccaggatgttctcctttgatgtgagggcaatattcaggaaagaacaagatgaaggtcaaaggaggcctcttgggtgcattaggatcttttaactttttttctgtctcccctttaggagagatacgggtttcatttctctttcataacaggtcttttccacctttgccctgtctgcagattttcccttctctttagcagacatggccttccagcactgagtacttctgagaaaacttggcaaagctgactgagacagctgagtgctgcttctcctgctcctcccagcaagtttgcacagactgtgcacctgatgagattttgcctgtcagcttcttagggtcgtctttgcctgtgtttagctatttgttttcagcaaggcacagagctgcccatttcccatctggttctcacttgccctggtgctgtctcgatggagctcagtgtacttcagtggctgtgaaagcaggagcagtcaccaaaatccaggtcttctgatgtcctgttccctgctctttccgcctgggagcatgcccacccctccctggcctggcccccacctgccccccaggaggcagaggagcagaagggcttggatgagttgtcattgtacatgcccctcagcctcccacaccagtgattcctgggtggaatcacagtcccagccccctatcttactagtttggtttcatggcacattatctcttcatctgaaggctgctttatagcataatgtcttttttttgttttgtttttaagatggagtctctctctgttgcccaggctggagtgcggtggcacgatctcagctcactgcaacctccatctcccgggttcaagtgattctccctgtctcagcctcccgagtagctgggactacagacgtgcaccaccatgcccagctaatttttgtatttttaatagagacagagtttcaccgtgttggccaggctgatctcgaactcctgacctcaggtgatccacccagctcagcctcccgaagtgttgggattacaggcatgagccactgcgcccagccataatgtctttgactaggtaaaataacgaaggcacatgtgattggaataatctgatcccatgtgattgttgctgataccccagtgccttcaagctaaagtaggtaattactcctctatattgagaatataatattaaatgcaagaaacgaccgccacaaacctttcatggcttctttcagcttgtcactgccctttcctgtctccttccctgcctccctttcccccagcgtcctcttgaccggggacaaaggaaagaaagactgggactggtgggaatgtgccagcaatgtgtgcatgaagccggttccctgtttgtagggaagtgtcagtgagtgagtagacagaaatgctctgtccagacgtgaggcacaagctctcccttggcatgtggtcattctccctgtgcccagggaagaaccctggtagtgagctgctgcccatctgcagatgtgtctccacagggacatatggaattgttttggcataatgtcacagttggccaacttttatcgacttgtaaaatgatttccaaattttaatccaaagtttgccctttgggaggaaagcagcgtgtgaggaaaataaacttgaggatagagttgttgactttggttaattgatttggattttttttttaaagaaccagagaaaggaatggatgccacgtttacctcatgcccatttcatcacttttaatttttctaatcttgccatctttcctccagtttcttcattccagcccatttaactcttgtttcctcccctcaagtttcaggtaggggttggctaccaatttggttcatttctgttacctgacacctgtgctcaaaagctgaattcaaatcagtgcctctgttgtggaggggctgaggctctgaacggcccaagcaactgtctaaagagtcccccaaatgaaggcactaacaatcctctaatcaaacctaactttgaatgcaagtgtcaattcacttgctagcagtcatcagcactgtcttggagaaatacagaatggatcattcacattttctattttgtagtgaaaatccccttcatctgcaccctagttgctttttaaggatgacctcaccatataaggctccgagtttgttaagctgtgctggatcgtgtgactgctttatggggtggaacctgaattggtgatggaggattggggttgaggtggagaagaaactgatctttgccaatggatttatccttcctgtacacaaatcataattcccttgtgtgtaaaatgagggccagcacatctgtctccccactttctttgcagtgtttgtacgtagtcattcagaactgattagcctgtttgtagattgttggaccacacttcacttttcttatttcatcttttgcatcaactgatcgaccagcattagaaaatgtcaatcattgtaggctcgtctgagatacagcgcccaggtcataaaaacatggctcttaacaattagtacagtataagttagaatcatcagggcagctttttacaaatatagattcctgcgtcctaccaccagaaaatctgatccaggaagtctgggatgagactcaggaattcacattttaattgacccagcaggtgattctgaggtaggtggccccatagacagcattttgagaaccaccatagaggattgctgggaaggacccaggcactctccttgatttatggatgaggttaagggagcctagagaagtgaagtgactagtccaggttggttagttggttgttagagtagaggatgcattagaactgagcaccagttctgggcttttcccactgccccatgtgtaggagagtagactaataggaaacagacttgctttccacaggattgatttaaattagatacaaggaaaaacttcctgacatagaagagtatgaggaagtctacatctttcccagaagggtttaattcagggctaactctcatcagatgtgggcacttgaggtacagtttggaggcaaggggaaaggaaggaagcctttattgaacaaatgctggttgttgtgcattaaggggaccagaaactcttcttcgggtctgctaatgacatctgaagtttcacctggacagcgacataagtggccagtgatccaggaggcctgaatcctagccagctgggatgagctttgtgatgttggaccacttgctcagttttctggtctctgctttctcactgtgggacaaatggggttgcattaaggtttttctgatttctgtggttccagcatttttacttttcattgtagccccttcagcaaagtttcttacacaccataagcagtcagtggagttttgtcaactgaacgaaacaaacactactcaatattgagaatgggccaggcgcggtggctcatgcctataatcccatcactttgggaggccagggcgggcagatcacggggtcaggagtttgagaccagcctggccagcatggtgaagccctgtgtctactaaaattacaaaaataagccaggcatggtggcccacgcctgtagttccagctactcgggaagctgaggcaggagaatcgcttgaactcaggaggcagaggttgcggcgagccgagatggcgccactgcactccagcctgggcgacagagggagaccctgtatccagaaaaaaaaaaaaaagtattgagaatgcaggagcccaatctgccaatttcctcctcccaagcccctaccctaggacactttgagactgtctctgaacagtctggtagtgataccccctgtttttaaaattatttatgtatttaaagggatctaacgacaagtgaacatgagttatagcttcaatatccatgtacttttatgagtgatcattcagatctgtatgcagtgttgacttagagccactcctcaagcaagaagccagaccagcatcacatctccaatagcagtgacggttgctggtcgcaagtctctgtgcctcttctcctatggccaccccactgacgggctgtctctgttcttttcagaaagcagatctggctgtggcaggcctcaccattacagctgaacgggagaaggtgattgatttctctaagccattcatgactctgggaattagcattctttaccgcgttcatatggtaagagacttattttataagcatttatgtcattaaagttatttgcatgcaaacactgagttatacgggaataatgaatgactcatggaaatatttagatttcaagacttaaatgcaaatgtgctgggctattttttctcctatcatctgcacgaacttgcaaactgaagggatggaaaagtcatgcttgtgggctttccagtaaaaattacttctgcctctctgaatagcgatgaccaagaatggtcattcaatacttggtggatcctgtgttggtgattggccccatgggtcactttgctcccttgcctgcagcccagataagtcaccctagcatttctcaagcacgttgccaacttccaagtctgtgttcacttctagtgttgcatttggcgagggaatgtagattccttctctctcgatgatctgtcctggagaataaatggtagataatttaatgtcatttatacctggcctgcccttttctgcattccatgcccccatcagaaagactcctctggctaggtaggccagggtgagtgtcacagtgagtttgtgagaacacaccaataggcagcagagtacagacacgaccttcaagtatactggccggtgggaagagcagaggaagagtcaccctggctgggtctcatccatcagtgaataatcatgacagtgccagcaaatagctgactttgctagtttatcttgctggaccagaagagccttcctttcctcttgtcagctgaactggctctaagtgcagagcgtcatacagatttgcccaatacactagtcattttcagtgcccatgattcagctgccatggtatgctccagaacagagcctgtacctcgaggctgcccaacagggtagagaccaagagatcacccaacatgcctgctgaagaagtgaccccttgccaggccccacatcccagctctagagaaaaggagatcgtccacctttgcagctccagcctatgctcccaaccctgtgatgggggttgttgttaagggttgaattgtgtcccccgccaccaaaatatatgttgaatttctaacctctaggacctgtgaatgtgacctcatttggaagtagggtctttgcagatgtactcaagtgaaggtgcagccatgctagattaggctggactctaatccaatgtctgacgtccttataaaaagaagggaatttgaacacagacacatagaggagaatgccttgggaattcgaaggcagagattggagtgatgcatttacaagccaagggacaccgggtattgctagcaaccaccgaaagctagaggagacaaggaaggatcctcctagagtctgcagagagagcctggccccaccaatacctcgatgtggccttccagcctccagaactatgacatgataaatttctgttgttttaagccaccagttgtggtacttttttatggcagtcctgggagatgaatagagctgtgtcattcttattttagaaatgaggaaactaagttgtaatcagtttaaaaacatgggcaaggccacatgcttataagtgaaagaacagggttcaaacccaggaatgatgtgtttgaagcctgtgctttctccaggacagcagcctgccaccctcctgtgtgtggtctttgaatcacttgcatagggcacttttgtgcaccctttttctcatttggtcctcaagatggttctttgggggaaagggggcaggtatgataattcccaatttatagacatggaaactgaagtcatgcttggagctagttgagggctgagcctggaacccaggccccttaactccaggagggtgtcttgccatcgttacatctgttggtactcactaggcagtcttccagccagcaccatttctggagctcccctcccccacattgacccctggagtcgggggacatccaaaagaaatggaggcacacagcctttgtccaaactaccctgctgtggcttgtggtagccactcaactaggctctggccttggtgtctagattcctggagggaactaaagccttcctggtgactcagtggcccatcaggaaccagatggcagaaggtacctgaccccaagtgtttttgccaccaggaaacacctactgctaggctgccctccccacctagggcaccactgtcctgaataccaactctggccagaaagaaaccacaattcaccaatcctctggacatcccaaattggattgttgactaaatgtttcctaccacctgaaaacctgtatgagtttccctgcattcatttctgggatgacaacttttctgtgtcaacttggctaggttatgttgcttagatgcttggtcagatactagtcaggtgttgctgtgaaggtatttgtagacaggattaacaactacaatgaattgacttcctaaaggagagtactcttgataacgtgggtgggcctcatccaatcagttgaaggacataagagcaaaacctgaggtttcgtgaagaaggaattctgccttaagtctatcacatagaaatcctgcctgagtttctagcctgcctgccttttggacttattagcccccacaatcctgtgagccaatttcttacaataactttccctgtctctcccaatatctctatctctgtccctctctacacacacacacacacacacacacacacacacacacacacacacacacacctgactgtttggtgaggattcctctcctcttctggcctccacactgaagcgccaggatgccacgtggctgcctagacctgattgataacagggggccaagcaagaaatgagtgctgggattaacagcttacactaagcagaactgacagtttctacattttttcaacaaatatttattgagtgcattctgtgtgtgagacaccatgcttaggaagtaccaaaaagtcagctgaggggagaacaatcccaaattgactaacccaggggagatatggttagaataagtctgagatgaacgttgttatgtctgaaacagaggagggccttaggaagatctgctgtggctaaaggatgaactggtagagtccaccccaagagcctaattctaaacttacatagagactctatctctaatatcatagtgttaaggtaatgaaattaaatactgggtgttcgttgttttgcaatttttctctagttgttatctgtgagcaaaaatatgggtaatttaatcacatttatgatctataaggatcgagaatgtctatgttagttctatgtttatgaggtcacctgactgatgagttattgttaccaaaaagtgagcatctggtggcaatcaaacctgtgtgcgaatgtaaaaataattaacttagagtgcctagttaagaattattgctaaagcctccaaaataataagtagtggcaagtatgcctctgaagtctaaagaaataatttgtgactttccagcgatccaagattatctaggcattttcatgaacacagatcatcaacagttgattgtgggatatttaccttcttcctaacactgggtataatctctgtttctgttcaggcatccttaggaccaaaataagaatgttttgctctttttaccacctactccctgttactcacaggctggctgaggagtctggctttggcattcgttactgtttttccatcctgctttttaaaagtcactctctctctgtctctctctctctctcctcccccccgtcccaccctccttccctcccttctttctctctctctctctctctttttgtctttctctttctttctcacccaacttaaatgtccatggtccttttctattcttattctaccaactctccctggataatctcactccctcccaaatctgtgaatctaaccctggctgctcccctgagttccagtagtgtaattctgacacatttcttcacatctccatctggacgtctcacaggcaccccaaaaactgtgtcacaagctgaattctgtgtgtttctgagtcacacttatgcctccttccctgtgccccatatcaggcaatggaatttccatccagtaacctgagccatccttaggttttcttaccttacaaattctattggtcatctcacctcccaaagagttctcaaatatactgggtatccccacttgtgccttggttcaggctttcctaatctctactgccattcctgcagcctgtatcctcctttagggcaaggcatttcttgtccattactggatccccatcaaaaggccacagtcattataagcattcactaagaaacagcagagtgagaaccatggactctggacccagactgtctgggtttattcccagcttttacagttattagatgcatgtcacatacatctcaccttcttcatttgtaaaaatgtgttgtcgtgcaaaattaaatgagaatacatatgtaatacactcatagcagtgcctgacatatacacaataaagtgttagctattatactcaacaaatgtatattaattgttccttcataatctatttgcagcctgggtgttggtttaaaaaaaaaaaaagacaaatgtaatcatatcaacctccttcttgaaatcattcaccagctgcccatcactcacaaaaaaaagttcaactttcctgcatccaggtctttgcctgcaagcacctttgccccttgctgctcactgctcttttgtcaggtcagccccttcctgcctcctcatctaggttcacgctcatctacctgcctctcagccagctaacgaactctttcctggctttcaatacccagctcaaatggcacttgctcttccacgcagctcccctagatggagctgcttgccctctgcctatacttctattacaacacttttaggttgcattacattattctttgtttatctatctctccctttgtatcctccgatgggaggtatattaagggaaaggtaccctcttgtcagaccatagatttttatgatacgatttttggtatggaaaatgtggtcatcctaaacatgcagtatttacttgacaggaaggaaggagggcaggccataaatccagtgatcctgtgggcagtgaatgctatgctttcctttgtgctcctgattgggcagtactgagccccaggaacctgagattctattagggaaccttacagggccagtattctaggcagcaggacaagtgacccaaattcttttttaccttctggcctttacccctgtaggtcttgagaacaaacagaagtgggatgcagatgtttcaggcagcctagatgcagcctctggctcaggtctggctgtagctgcctcctgaactcactgctctctctctctctcaatgcctgcatattccacacacaacatagcatccacctgagaaagtatcagaatccgtggctagggccagatgggcttctaggctatatatagatggtccagcctttagcctttgttgtcccctgatacttcaaggatgggagccaagtggcagaacatctgaagttcaagactcttggtttccctggcacatcagctcatctccttgtaatgataagtttagtatttggtatagcagtataattccaaggacattctgcagtcaagggttttatggtattgatgcatactttgagctctcaaatatctgtgtgaatggaggggaaaagaacatgaaaaaccaaaaccatttctatttgacgttagagtatatcatgtagttttctgtctctttttttctgcagcagcaatttacctaatgatgttttgctcagattaatattaaagtgagtttgtattcctcaagcacaccccgactattatagcaaggcatcatcagactgcgccagaagccaaactgggattaagtgtttggcccatagaacccccacatgaataaatttcatctaaacagttcgttgttgctgggtgcagtggcgcatgcctgtaatcccagccactttggaggctgaggcaggagtatcaccagggttcgaggctgtagtgagctatgactgcactgcagcttaggcaacagagcaacaccccatctcttaaaaaattaaataatttaaaataaaaactcagtattgacatcttcaaggagattgggtatatgtgtaagatggtggtttgttgactcacgtctcctaatttataaagcacttccatatacagtctctggtttaacggaacagtgcccggaagcaggtagtatgattctcattttacaggacaaaattctgaaactctgtgagcccagttagtgcagaggaaagaggaaaggcaacacaatgttgcagggggcattgaaaccaggtttttggtctccaaatctccatacatgtccaactacctgtctttacagtatcataggtgtatttctttcagtgtcaacgctattctttagatgatctttcaagatcctttcccatctgaggatactatctctgatcccagagaaggtcccaagccagctagaacacccgagactccctggaaaatgtgagcttaccattttccctccataccaacttgttccacctttggttaacaaatgggaaagttttatactctcttctttttctcttcttaactcttagctagagtcttctttctcaagaaaaagaaaaatcagacagtgtttaaaaagtaagggagaaataggctgggcacggtggctcatgcctgtaatcccagcattttgggaggccgaggcaggcggattatgaggtcaagtgttcgagaccagcctgaccaacatggtgaaacgccatctctactaaaaatacaaaaattagccgggcatggtggcacacgcctgtaatcccaactactcaggaggctgagacaggagaatcatttgaagccgggaggtggaggttgtagtgagccgagattgcaacattgcactctagcctgggcaacagagtgagactctgtctcaaaaaaaaaaaaaaaagtgatggagaaataaatgctgacattaaattaatgcacgacattgctggatatattacccgcttttcaagaaggtctgtttcatttcagaaagactgtctaggaaaatggagaacaatgctaagtaaaccagtgaatcatttctaatactgcttaatactctgttctaagaaaatggaaaatgaatagagttctgttccttaaagctaagtaacatgatagcccatataatggaaatatggatccctgaatgtataataatattggttatttattgagtgcctctctctgaagaagctcaaggtgtgttaacattattttagtaattctcacggcccctcttcatgtggattaaggtgctccattcatggtgctcctttctatgggggaagacaatggcacccagagaagttgagtgacttgcctagcaccaccactcagcaagtccaggtcaatgccaggattagaatgtaggtctcctcacaccagattttcagccagtaagtgaaaatagatacactagcatatgagttctatgggcaacagacccatctgggtgctttacgtggataggaattaattacttgcttccttttttcctcttggagtcagaggtggaaagtgcatgctaaaccaaaatatcagcagacaatccattgcagacacactgagggaagccatccatgggatcctgctgagggacaggaagaaatcacctcctcctgcctctcccagaaggagtcttggagacactgcgttctcttacctcttcagccctggacagtgtgtgattgaccattgggcactgctgggagttgactatatcacaagcaacctttctataaattgccatttagttctaaagactgtagaaatgcatatgaaggaccctttgtccttggctatgctgggaggggatagagtttcaggaaagaagagagctcgtatcatgcatttgtgtagggaaatggtgactaagctacagagccctaacacagatccaagagaacctgcaacgtgtctggtccactctgtcaatgacgtctttgggtaggctgaggtgggattgagttctaaaggttggaatcactggcttttaagagtcttccttccagaagaaagcctggtattgccctaagtgcttctctggagagccctggaggaactctcatgatgcatatattacagccatagaagctccaggagttctgaaaagtggctgtagccagatagcattcttccccaaagcatctttaacatgtgtcactgtaagagagaaagtatagtatttcttgtccattgaggaaggcatcagtataaaaggaagttcccgcctttgtaacacaccatctccccactcccccttcactcacggctaccattagacagaaggagagtgaacatacatacagctctatgagttaactcactgagttcccaaaacaaccccacgaggtaggttttattattccttccatgttatacaggaggaaacagagacctagaggttacccaacttacccaggattgcatgtcttgtaaatggtggggccagaattcaatcttgggcagtctggctgcagagtctgggttttattcactacctgtcctgactgcctggctccggtgtccccatgaatctggcttcagactctgggaaagcaattgcattcttccgagaatgtcatttcttccagtatatatagagtgaagtatcaatgagtcaacagattgtttttaaggataagaggaactttgggcatgaaaggggggtttaatgccacttcatagctccatggacagccccactactgtcatgcaaaggacctacacacaccaggattgtggtcagttgatgaccagccctttgtatctctccctccgtctaagagcatcagggatgctgattgatggtcagtctgatgcacagtccaaatgtcaagggagctaattctaattttgctgttgtctaattttcaatttcatccgcagagcttgacctgtcttcaacatttggggcatagactatatataaccacctatctacttccaaagtgattgtattcaccagaaggaactggcccaactcacagtcaacagagacgtgtataaatcaatacaaatgcctataaatacagcagagtcacaataaatggtgatgggtataaataaataatgtttaagagtactctaagggggtgtgtaggttgagagtttgctggcattggggagaaggcgtgggattaattagggaatttattggagtaaataaagatgcgaagatgaaaaggagaggaagatgcagtacagctgccatttgaatgaaggagagtgtggcatgcctatggcacagcttgatgaatgagcaccagagaaattgaagccattgccaatgatttgagcgaggcacttaacctccctgggtcccagttcttccatctgtcagtatggaaaattgggtattgaaatcaagagaacatagtgaagcatttttagttcttcaaaagaaaggcatcactgtcatacctcctttgggctaaggaaaatcaattatttggaagaaatgcctatggcatatgacacctgatttgccccaagcgccagtaactcacatgtcttttgggaagaaagtgatctaaaccatccacatagaaaaaaatggtaggcattcagaatcttgcaagacacatacttctctttggcatcatagagacagcatggatttagcctaagccaaggctgtataagcccagacccaaatctcaaatgactgcccattccttgctcttctggttggcgtcagtcaatcacaagtagaatcagatgttgccttgccaacgtgactgatatgtttctgggggagctttgtttatgtcatggtttttgttcgtgtgatgttctctgttttataactttggtctctaggaatttttcccacagctgtgcatcattccttatcacccataaccaaatatggcagctttaaatagtgctgtcattttcctcaatttcacttgtgatataatcaggtatagatttctgacattgagcatctaatgggttttcagattcagaaagcaacagtaatagatttttcagttgagagacagattgaaatagtcataagtgacagggcatgtggaattcatgcacatttactcagagaaacttgggggtcaaaaaagaccccaggagtggaccacactagtgatttctattgcagtaggagtataggcatgatcggctcctttactgcttctggactctgtatatggatgctaccctctctgtgtcttcctgtgtctgcctctggctcttaggatgatgaaggaaacacagtcaagccatgatggacacaggaatgattaactggggacttggattctgctgctctggagtcctttgccttctgttagaggatttatgtaatgacgggatgagccaagctcaaatgatttcctcattcttctcctgttcccttccctaagttactgggttttgtcccccagatttttcatttttccagtaatacctgagtgttgtatgcagactgagcatggatccacagtgggtcagagaacttgcaattggtatcaaagggcagttccgtggtctgagccaatactgtgaaagaaaaacagtttcagatagatcacgtgagaggtcactgtcatgctgctgaaaggccacagtgcccaagaacagctgccctttttggcagaggatgagtatttccatcctctccgtgtaccctccaaagaggaaagtaaaactgcaccgcaggcccaccggctccctaagaaggaagggaaaagcatccagaagaggagcggaaaatcacccatgatgggggctatgcaaatacaacaggagcgtgcagaactgtctcctcccacctgcctcagatgcagccgtggaaatagctattgctacttggagtttctcagcttcttctagcttcccctggataatgaaagctcagaaggctggttgagtttagctcggtattggcaaagggagttcccttttgtgtttctgggaaacccagtgtaaaaatgacatgccttgatagtgacagtaggttgcgccatgactgatacaattttgagcttaaacgcttacctgttcatagaaccctgagcttagtactgattttcagtcctatccatggacttcctggatttctggcatcatagaatcatagcgttttccatttacaatagtccttagggtgcatctagtccagtggttttatagtaaatgaaagaaaccagcctgggacaagacagggtagcagcatggagctgcagagaatatgccctgtctccagtgggcagcccacactcagcttcagccagttgggaagttggactcagtggtgttggatcaccccattttttaaaaagccagaaatctagatttgtatgtgaagttacctaattatttaacgctggcaactaatacaaactaggtagatgctgcaggataaacaattcaactctgtgggccgtatgcatccataagccactggtgtgtcacctcggatctattcccactccaactgaggccagaaaggggtgggaacttgcctgagaccacacggctaaagacttggagcagatgacttaactccatccttctcattccattttgttttcccgtgaagaatggcggggagcttggtgcccaggattccattcctggctccattgtctggctcacaggactctggccagactcatccctggccttgcaacgtgttttcccacggtgcagtggagtgagccctgggctttgagtcaggaaacatgggcttttttgggtcccggctcttccatttacgcactgtggaacctcgggcacatctctgactgccctcggctttggcttcttcacttgtaaaatgagaataataatttgtgcctcccaggactgttttgaggttgacgggggaaggtctcactgtgtgagatcaccccgcaaacaaaacccagagactccggttgtattagcatcctggtgaaaaagatgtgagtgtctaagagggatgctgtggtcgaattcagcaatgcagacagcagcagctcaaaggtgcttcctgagtccatcctccacccccgatggaggacacagggtggtacttcggggcactgagggttgttcctctttgccagcacaaagcctgcctcaccccagggagtggcatggcccctgctgctgttctgtgtcacctgctgaggtcagggctgggtcgtgtcatttgcgcagcccggcaacaccctcattcccagtgtcatttaaaccaatcacccagaacccacagaaatgggaactggggccagacccacactcactacctcctctaccccgccctgcctgccccaaggtcatgttgactgaatgtgtgcggtgaatcttgtttttctctccatttccagggacgcaaacccggctatttctccttcctggacccattttctccgggcgtctggctcttcatgcttctagcctatctggccgtcagctgtgtcctcttcctggtggctcggtactctcctcttcccttccctgtccttacaccgccacctcgtgtccacctctgggaactgcatggggagggggtggggaggaggagagggggaggaggagttgggaagatcttggtgccaaactagaaggacaggagaaggactgggggcctgaaatgctctctgcccagctgtcgacctcatgctgcccatccaaacattccccactgtgcacgacgcagacaggtggcttggcttctgcacctctgcctcctgtcccctcccacttctccccagacccccacctaagccccttgcttgtgtaggagccctgggaagagaggaggggtggggttggcaggaagatgactctcattaagcactgtgcatttggctgccctggcatcagtcattgccacaaaggatctgccacaaagtgccgaatgacaaggaacagagcctgcaaatctggactgggggcactgggggctgcagtggagcaggccagggagaaggctttctctgcagacagcctgggcctgcctctgaaaacacagctgccttgtcgaatgggaaccatggaggctgctggcgggtggcaaggagacgggatggagagaggcgttttcaagaagtgctgagttgagacgcacgggccagaccagggaggggggagaataagccctgccctatccccaggaaaccaggggctgccctggccctttggaaaaacctgaggagcagcctgaggctgtggcctcccaagactgtgcacagcaaaggtagtttcgctccaggccaaggctgttgggccagcctgagctgcaggagagccagcttaaccctccagaagtgggatgagccctggtggctcccaggccactcactcaggtccctagtgctgctaaccctccacttactgcagtggaggctcacaaagggctgttatgtgggagcagagaactactcaggaggagcttctggaatctgtccgtggctctggtttgcaggtgtctcttcagttgttacctttgcctctaggccacagtgggagggcagacagtgttagagtgcacatcccatctctgtggggtgggtggggtcttcccctagggcacgttcattcactggattgatgggggcacttggggatggagctgccgcatggtaagccctagggaaccacgggctacctaacccctgagggcacttcccagactgccagagaagggttgcatcaacctgtctgcacatacctcttctagtggagaccaaggtccccaagatcaggaaggtctttggggcccacaagatgcagccaaaaaaagacaggccttgctgacaacctggtcattttcaaacgtggcagagtttgctgcttgggcaccaccaacccctctcgggcctgtaggcatggccactgttgagtatctgctgtcagtgacggcctgcgagatggggagctagcacgctgtctgacacctcccctctccactttgccacactgctgccatgttaggaggctgtctccgtgagcctggtgccactgctctgtaattcacacttgccccttggatgtgagcccttgcgtgtggcatgccacaacactcaggtcacctcaagggccctgaaaagtcttggggtttggagagcagatacatacaagcctgcttcagcatacccacagcagcctagagctttcaaccagccctggggtgttacgctgcccctcctccctcccctccacatccaaacacaccccctccagcatctagcatcacagaaaggttaacagaaaatgtgctaaagggctaaccatacggcctctctctctcactacacacacacacacacacacacacacacacacacacacacacacacaatactggagtctagggtattctgtcttaaggtagtgattttcaaacatggttctatggactgcaaaggctcctgggagcaaccagagcctttgggggtggaatgacaagaggctgggcagccagagccctgggtccccaactcctcctcatccagaccagctctacttttatttcttatatattgtacttcgggtaagattttacagggaaaaaaaaatgtctgaaaacaacagctcttaggtagccattcccaagagagctgatcttcagagtcctgtagggagcttttagacatttgaattcccaggtcccatgagctcagaatctctaggggaagggcctgagaatctgtatctttgaagttctgcagatcccaccaatggtccgtaggcttgggagccaacaaagtggggcaccagagtgccagccagctcctcgggacccacacagagggacagagcacatctcacaggtcaaaggaccaatgctgagacgtttgtgttgtactcaggaaggagaggcgcggatggaaacgggaggcagcgacagtgggaacactaagtgcacatcaggccgagtgcaggatgggaaagagcagtgtgaagataacaccgagcacacagcaccccgccctcctgggggtgcacacctgtgcatacagtttctctcgtcagagctggaaggctttgcgtacaagatgggccggggctgcaagcatctccctggcgggcaggggaagagcaggcattctgggcatcagaggggccattcagagagacgccagtggtgaggctgagagggaaagcaggggagtgtccccacctcaccccaaggcacagagcttagagcagcccttctcagccccatgcgtgcattacactcactggggagctttaaacaaacactgatgtccaggccccacctgagccaatgaaaccagaatctttgggagtggaactcaagcagcagcattctttttttttttttgaaaggctctggggaggtctgaaacacagacagggagagcctggctttagacaccatcgaggccagtggctctcagtatggacactggcccggtggcaccagcatcatctggaaacttgggaattcttaggcctcaccccagacttaccagtgcagaagcattgaggctgggcccagccatctgtgtcagcacaccggcttggtggttctgaggtaggctaaggctggagggccactgctctaggctgagggtcttcaaaccgtggttctaagggacactaatatctctctcatcaccctgtcactggcagtgacagaacaagcggcttcccaggctgtccacctcttgacactcctagcctcaggggctccacttaatctttttttttttttttgagacagggtctcactctgtttgtccaggctggagtacagtggtgggatcttggctcactgcagcctttacctcccggactcaagtgattctcccacctcatcctcttgagtagctaggattacaggcacacaccaccacacctggctaatttttttgtattttttagtagagacgggttttcgctgtgttgcccaggctggtctcgaatccctggactcaagcaatccacccgcctcggcctcccaaagtgctgggattacaggcatgagccaccgcacctggccatcctctattctgtattttggagttccacatcagaatttattgggggtaaaaatgtctctttgattaaaaaaaagtttgagaaccatcaacccagttcaacccacttattttattttattttttttttggttgcgaaactccaagtccagcaaagggaagtggcttgcccaaggccacaggccggtctcagaggtgagaccagccaggagagcctgcctgtgtcccttcacaccccgcctctgtggcactagtgtatgttccttttctcccacaggttgacgccctacgagtggtacagcccacacccatgtgcccagggccggtgcaacctcctggtgaaccagtactccctgggcaacagcctctggtttccggtcggggggttcatgcagcaaggctccaccatcgcccctcgcgccttatccacccgctgtgtcagtggcgtctggtaaggccccaggcagaggtgaaccaggccaggtggggtggggacacaaaaggggccctctgataagccggctctagcttctagagccccagagcctctgcctcttacagcagacccacgcaggaagccgagtgctttctgccagctcagaagcttggggcaatggatggggcctgctctgtgccatctggtccccttccccttactctctggggtctggatgcagaggggagccaagggaggaagggagaggaggtgacaaaacagccttgatgaatttcagcaaagcaatggtaacttcctgacctgaaaatgacctgaggtttgagaaggcatatgcagatttatgcaagtataagcctgctggcaggaagtccctgcaggaggaagccagcctggctgctacatcacatcccctctaccagccttctgaggctttgtgtctctgcctctggctctgggggcttgctggcctgttcacctcagcaggtgtgggaaaacgcaactcttgtcgttcagagttgagcaaatgattcaatgtgtgggaaagctctttgaaaacttgaaagtgctacataaacatatggactgatcattgttattagaccattatgggggcaaaggaaagacaaaacaaatgtgtgtgtgtgtgtgtgtgtgtgtgtgtgtgtgtagcctagagaggcaagtttgcagaacacaactttttgatcctctcttaaaaatctgctgtgggtttggctgtcatagcatacaggacttacgaccttggttctctcccttccttctcagcctgtttagccaaaggaaaaggaaaggtgatgtttccacccttgagtactggtgcccagagtgggtggtctggacagaattactggaggagccactgggctgttaggaaggtgaaaacgcagctgagatagccatgccttcctgtctggggtttccattatccctgataaacaacaaatgtagcacgatttaaacctgggcgagatgcttgcctgttaccagatagtttggagaagtcactgaatggatcaccatggagaacaggagctcaggtctccaggaagagggatggacgatctcagcaaggagagtcacggaagtcccacccacaacatccgggaacctgggcagaagccctgggagaggagcatcgggggatgtcgatctccttctccctggggcttttccttctggagagtgcctgctcccacagatggatgcagctagaaccccattgcccactttatccgcttgtcagctctacccttaccccaggaaatccctcctccaggacccagccatcctgcaggttgccctgccctgaggggaggactcagcgctgctttaaatggctggccccaggtggcttggtcactgttccagagctgtgtgagaaggggctcagcgcgaatgcaagccgccgtgacaggcctgtgccagccccgactccaggtggtcactgcgcttctctcccagcacactaacagttcctagttcttaaatcagggcctcggtttggtccgttccatggaggagtgggaggtcagaagacagggccatcgtggcctacctcggcctcctcacccagagcacgtgatagaaaacaccatgtcgctggagagaatgccagtttgacaactgaaaatgccctttgacacaggagcgaggctccactgagccctccggaagcgggcatcattccctttctcagcagagccgatgggtttgcactgagccgcttgtgccctctgaccagtttccttgtgaccaatggcctaaatagccacctggtgtgtagccagagtgtagccaactctgaagtcatgtccacacctagggctcattaacccccagcacacaccaccacagctaagcagctgcagagtgctggcttcctcctggggactgcccaccccaggtctctgtttagggatggtcatgagagcaccttccaatagggcagaagagctgaggcaggagcagggagagcagaccttgggcatggagggatacctgctacttacaggtcacagatagggaaggcagaaggaggcagccaggtgattttcatcccatattcagtctgatggtctctctatacatttctctatatctcacatccctctagtcctttacagattgctgatcactcatgacatattacttcattttatctcacaactctccagcaataggcagagcaggcatgattatccccatatatttattagacaagtaaatgagctcagagaaggcgagtggttttcccccacattctcacagtggaacacagccagaaccaaaacccagctcgctcatggtggtctgccatgtagacatgcccactgagtcagaggatgcccctgttgcttcactcctggggaggcagccagcaagtgttcttggtcacaatggcaaaaggggcaatgggacctgctgctcttgaaaatctacacagcagtggcaagttgccaagttctgtgtgttaatcactatgcattcatcgtcagtgtctctatgatggataaagccccatgaactcaggctccactgattcagaatttgtgattctccatcccaaactgtgcttagatctatctttgagccccttgggattgggatgtagatccatactgttgaccagatgggagaaggcttgtttaacctactaaaatgaacacacagtttttaatggacttagcatatatgctgcctgagctgcaaaattattctaattttaaatgagttctgtctactcagtaaaacaatcttctaatttgaaatagcatgaccattgtaagagtattttctaattccagcctttcagcagttcaaaagtgcttttcgccaggtagtctttattaaagatgttctgttgttacaatttacagaactggttttaaaatacaaatttatcagctggcacaggggctcacacctataatcccagtacctggggaggctgaggcaggaagaccacttgagcccgggagttctaggttgcattgagccctgattaagccactgcattccagcctggatgacagagcaagaccctgtctccaaaaaaaaaagaatttatcggccaggtgtggtggctcacgcctgtaatcccagcactttgggaggccaaggcgggtggatcacaaggtcaagagatagagaccatcctggccaacacagtgaaaccccgtctctactaagaatacaaaaatttgctgggcatggtggtgcatgcctatagtttcagctactcaggaggccgaggcaggagaatcacttgaatccacgaggtggaggttgcagagagcagagattgtgccactgcactccagcctggcaacagagcaagactccgtctcaaaaaaaaacaaagaatgtatcactgtgttacttggcaggttgcttcacttctctgagcctcaatttcctcacctgtaaaattgggataagaattttgcttccgtgagctctagggattaagtgagatagtggatgtagctcgtggtagctgctcactgcctggcgatgcacatttgaaggttggcttcagcacgaggaggtgaggaagccctcctgctctagctctgaacagagcccttggagctggcacccgcagctcattcactagctcatttctcacagtctccaaaactgtctcatgtgcatggactacacctcttttgaataataacccaataatcatctcctttaggaaataagaaaaacaaatcaactgtcttcttccaggcagtgctcacaaacgcgattcatttctgttgacatcatatgccctgcctcctttctcttcccccactaagctgaaagctctttcataagaaagatgcctggtctctcccatgtcacagcaggactggggtcaggggccaagactccagggagtgcccgggcaatgatgacttcctcgtcttttcctacataggtgggcattcacgctgatcatcatctcatcctacacggccaacctggcagccttcctgaccgtgcagcgcatggatgtgcccattgagtcagtggatgacctggctgaccagaccgccattgaatatggcacaattcacggaggctccagcatgaccttcttccaagtaaaccccatttggttgctcaccagcatcgggaattgggcagaataaagttgagatgtttctctgctggagataaaaacatctctccgcatcttattatctcttttgaacatatagtttggaggtccacatggggctcatttatctgctgctccacaaaatactcctggaatgaggtcccaaaagaactttgcgttaatatcagccggtgccagagtggtggtacttgagatgattttaggtctgatgtggtggaactgttttttagttgccatagtttcatgtttatattaatggccattagaaaaaaagtatatatatgcagtgaatcaaacctgttgttttatttatattactgcatagaatggggttaatgcatacatttacatttttaaagtgatttaaatcgtataggtagtatttagacagagcaagattcatacatgaatgactgaagtttgaggaacaccagcttaagacgaactggcttcactgattccagacttgataggtatcagatagggaccctgttggcttctttgagtttcccttgcaaggctcaggagaaagccctgccacagcgatgtgttcgctgtcaagcaaactgattgatcgccaagactgacagccagaccagatggaatagtggttttcatatgcctcaagctctcttggaaagcaggtttcccctggggttaaaaggtgtctaaccaacctaatatccaagaagttcattttcccatgaaacaagtccaatgccttcagctttctgttttccaggcaagtctccgtgcctactggcacagacaacagtgaagtcatcatgcaaacacagagtttggatagacccccagagttctctgacttgttattatttgtaaaacagcagccagcattggatatgtgattgatcaattggtttagggtggatggaaaataggaaactgcttcttcaaagggtatctctgtatagtcctaaatgaacctagtcctaaatgaacctaagttcactgccccaaattgagggacaatgaaggtacccagccagaatttcagttctaccggaaaatggaggttggcagtagaagagctcttgagggtagatgaggcaaaaccaatgaccaaatcaggaccttagtgcgctgttgcttcctcatctttctataaaaggtatcaaaggcacaactccctcctctgccattacacagtgacagtgaacatcttgtgttgagagacagaaagggaaaaggttcttgactgtgatcagcgggtggagaagcagaagggccggcatcttaaggtgcactttgattccctctctttttaagccaacgtttccttcctcttttcccaatcctgcttccttttgttcttttcccagaattcccgctaccagacctaccaacgcatgtggaattacatgtattccaagcagcccagcgtgttcgtgaagagcacagaggagggaatcgccagggtgttgaattccaactacgccttcctcctggaatccaccatgaacgagtactatcggcagcgaaactgcaacctcactcagattgggggcctgctggacaccaagggctatgggattggcatgccagtcggtatgcgggagaggaacagcctctttgggtagctttgtccagacagggtcagggtagctcaaaccactgaatacagcattgaatccagtaccccctgttgttagaaccagtttaacagtgactttacgtgggcattctaaagtttttttttttttttaaagcaaacacacatatttcctttaatcaacgaccagtgctcaatccttaattattaaagagctagttgattagttactgattgattaattgactaatttaaagggctaatagtaattattaaagggcatgttaatgtctttggtgtgtatttaggccttttgttccttttctggcttgcttctccttggccatttctctgttgattgctatctctactagcagtgggaagaaggatgagatggtaaaatttgaatcagttaattttgctatttgttagcgttgccagtgaaaagtttacttctaaaggagacggccatgattagatggaatgctttcaaattatttgtggatttcactgatccatctatggtaggtcggtgtgggtcatggagaaggggcagtaaggctctggtgttcagcctgctgactgtcagcccgtcttgttgtattaataggaggatagagacgtttggcttccagaaaggtgtcctagctgtgctttttaaaaggacattcacactttggactttgggccttcccctgctaacagaacctccccaagaagatgaggagagaacatgtttagctgctgtggtgattgtgaaggggatctgaatgttcctccagccgcttctgacatgcacacttgccccttcacacacacaccatagagagcccgtgctgtagagggttgtgctggtatgagggtgttcttgtacaaggcaacaggggaagaagcaggaatcgaggccatcagactctgggagaaaattggtatacggtatgctcatctttgtagttacagtacacatccctgctgttgatctttaccttagctcaaaactctgtaaattgcaggattcactcacacctgtggagtgtaacgagcacgggctgggagtcaggcagaccccgggatgtgttctggttactggctgtggtaccttagatgcattctttagcctcagttatctaattcataaaattaggtttctaatacctacattatggggttgggaggattaaacctgataatctagttaggtgccttacctcagtgtctcacactgagcctaccttggggtatattagtgtccttctcatttcttccatggtttcctatgtttttatttatttatttatttatttatttatttatttatttatttatttatttttgagatggagcctcactctgtagcccaggctggagtgcagtggcactatctaggctcactgcaacctccgcctcccacttcaagtgattctcatacctcagcctcccgagtagctgggactacagacgtgcactaccacacccagctaatttttgtatttttggtagagacggggtttcaccatgttggccaggctggtcttgaactcctgacctcaggtgatccacccacctcagcctcccaaagtgctgggattacaggcgtgagccaccgctacttgacaaaagcaaatgacttaaattctgatcagaaacaaagaaaatgaacataggtaataatatggttcatctctgaactctgtaaattatggcactaggagttctgtgaactgtgaactggaggcttcactctgggtactcagaaacctgcacaccctctatatgctattatatgtcattggtgtccactaataatacagattatggacacctttgagagatatactcgctgacattttgtttcaagatggtagcgtgaactgcaaaatgaacttaaggcacacattgatgatactctagcaatttgaactaaatttcaaatgcttccaaagttttcatggaacaaaactatggagagttggggtaagatagaccacaactctagaaattttcatcaataaccaaggaaaaatggaaggaaattcatttgctctatatctgacatgacactgttttcacatgttctctcacttaatagtcccccctgcaagatagatgtggttattcccatcctatagaggacagaactcagattcagagcagatagattacttgtccaaggtcacagaataggtagagaagctgggtgtgagcctaggatgcttgtctccagtccagtaattcatttaccagaccatattgccaatgggtcctatcagctagaaaggacaggataggtgggaaggtctactctgagctagcccagcttcccacatgaggctggaaagaacattacacagttcattgatgagtcaggatttaggtccagctgggagtatgcccaggagatacaagcatgtatatcattcttaagtggaatgtaagagcctaactatggaataagcaatgtggttagacccaggaaaattaagcgagacagaacaaggaacaagatggaaaattaatcaggtggcttaggaactaagtaggtaaccaaggagtaagcagaataagcctttcatgtggcccctggtgtgttctgaggttgggttgaacatgccttgaaactgcttgaaatgctttgctgggctagacagttctctctaaacctgaaatgttcattagtctcaccacctaacaacatctgttagacaactcgttcatgtgtccattcacggcagatgtgtaataagtacttactgtacttgaagctctgctggtgtttgcccatatcacttgcacacgttcagtgctgcaggcttggggttcgggtccaacaatgtgtaagatgtgtaataagtacttactctacatgaagctctgctggtggttgcccaaatcactgacacacatccagtgctgcaggcttggggtttgggcgtccaagcatagttgtgtctatagtagggaaggttctactgtggagctgtggactgtcacagttggaagagatctgggagatgttctagttccttgcctcttaaagtgtggtccacgacccagcagcatggacatcaccttggggcttgttggaaatgcagactgtcaggccccaccccaggcctactgaatcagattctgcagttcagcgaaatccccaggtgattgcaatgcacttgaaaatttgaaaagcactcatctgtttgttccaagcttctgcctgatccttcatggtagcctttctcctctggggcatctgtccacatccagccttcatggagtttgagcaaggaaactgggcagcttagttgttttccagcctcttggcagctttttcttaataatgtcccagcctgtgctgggacattgagctttccgtggtttcacttaagcctgtttttgtaatgaaatctaaattctagaaccaaagctccttgacaaaatcgcgttagaaaaattaaaaagaatggtactgaacagaaaaaaaccttcttttgaggagggaaggaggactgggagaaacagggtgatggacaggccagtgggttctcgtgcactcagcaggcagtgctgagagtgaggaacacctggtgacctgattctcacactctggggtggctcttctctcattgattggtgacttctctggataaacagttgtcaggtgtaatgtagtgagagttacaagtgcctaagaaattaattaatttatttatttttgaaacggagtcctcacattctgttgccgaggctggagtgtagtggtgcaatctcagctcactgcacctccgtctcccaggttcaagcaattcttctgtctcagcctcctgagcagctggggctacaggtgcgcaccatcacacccagctaattcttgtatttttagtagagatggggtttcaccatattggccaggctggtcttgaatttcttgcctcaagtgatccgcccatctcagcctcccaaagtgctgggattacaggcgtgagccaccgtgcctggctgtgagaaattaatttaaataaagtagaaattggacacacctgactaaaaggtttgtgtcacagaaacacaaactttggcttcctggaggtggatgggatgctttgcagccagcgtcctgtgtgtcggtgggcaggttgtttaacttggatagaccatctttttaatttagaaagtgatggtgcccggctggggaggtggatggcacaactgcctggaaagccgtttcttgacccatcttggggtgtttggccatgggctggacctgccagtcagcatggagagaagggaagcagaaaagcctgagaacactgcgtgaagccagaatgccccgctcttccgggggagccccagtggagtagacagcactggccccatgggctcgccccacccgctgcatctgtctgtcccctctcgaggtgaaagcaggcagggtggccaggaggtgtgccgggaaggggagcagagtgacacctaacagggcattcacaacctgtgtcctgggctctcccgtaacccccgcaggctcggttttccgggacgagtttgatctggccattctccagctgcaggagaacaaccgcctggagatcctgaagcgcaaatggtgggaaggagggaagtgccccaaggaggaagatcacagagctaaaggtaaggacgttcagggccatcctcctcctgccctagaggaccaaagtagcttgtttctcgtgttcaaattccaggtacacataatgacttgtaggacccattgagaacggccttggaaggaacctaggtataaagtgggctggcgggggatcaggtctgtcccagggtcttgcgtatcgcaggcacccagtgtccacccggctcccaagtcctagaggctctgcctccatgttgtttcttgaacccagctgcctctgacccctagcaccatggcttctaccctggcccatcatctccacacctgtgcagtcacagtcgcctggtttcagtttcccattcttgcgtctctacagtatattctccgctactagccagagtgatcctttttaaaaatgcaaactcgatggcagcattccccccacaaacctcccaatggtttcccatcccactgggaataaaattcaggaccctgtgtgatctgttccccctcagccttcctctcttctctgtggtccccaagcctcccatgtggctcttccaccccagggcctgtgcacctgttccctcctcctggccttccctcgaagagctcttcactcccaccctacacatttctctccatcaccttaaccccaccttatttcccttctcagacctcatcgctacctgatattatatttcttatgtatttgtttactttccacttcctctactagaatgtaagtttcatgagggtagggttggtcatcacagggctgcccaaagagctggacatgtggatattttatcgaaaggatgagcaaatgttaaattaggctgaatagaaagcagtcacttactgagatgtatggctaagaagtgttgacggtccctgagcacccaggattttctgtaggggaacacttaccctagtttgcccaggatggtatagtcttgtttctatctattgtagatcagttaatgcctataaattatttctagacagtgttcattctcaaagtgtcctggtttagacaataaatcatatggtcacgtaccatatctactactccatctactgcagccttgttaaaatatgcaacagatttacctgtccacgctctgcccgaggaagacagctgaggagtaggatgaaggatatcatgtgcttgtcttttctgctcagcatgaatgattgtccctgatgagacagtgaatgaataactatgtgattctcagtgtctatacgtggatctctatcttgcaagaagaggtctcaagaatatggatatacggagcaagtattttttataatttaaaggaaatgctgccctcagaggaactgagtgaggccacacacttcttggctcttcactccccaaaggccagagctgaccatggggaaagcagtggacacgaatggacacagggcatgggcagacctcatttcagtctcgtctctaccagttgtgagtctgtgagtttcagcacattagttagcagcactgagccctcattcctttatctgtaaaatgagttcagtaagtaacacactgtagggctgctgtgaagggagagtgaaaaagcacagagcttggctcatccctgggcccagtgtatcacagctgtgactgatctgcaccctagcaccgtgctctgctgctctcagaacttcagggcagtctgattccatcagctgcctgcagaggagttactttcaaggctcagctagccattccatcaatagggatatgctgagtgacagtgaggtatcccagcacatcacttcacactcctgggaataagaaagctctacaggcttaccagcaagcatcttaaggtgacttctggaaacaaaattcacttacttgaagtggttagcaaacaattcttgacacttgccaaattacagttaaatactggggggtgaagtgcggagattacttctccttgttcagagtaaaagaaaatgggggggatgcagaaaaaagtgtcaaggcacttttgtggattggatagaatgaactggattttgaagatgcccaggacctgaataggtcgacaccgtgggaggagggcattgcaggcagatacgcaccttgaagatggatgtggggcaggagtcagtgctgtgggcagggctgtgtgcaggggcgccgggtggtccatgtggaacagataagaattcgcatttggggagttgggttgtgtaatgggtttgtactagggaaggtgtgggtagcaaaatgctcctccactccttcccccaaaagaagacacatggattggaaacatgtgactggacctggaatagctaaaataaagttggatgattgtcagcatatgttaatgttgctctatgataacaatgagttaaaggatggcaggaaagagcgccgtctctcctccatctgcagggaaacagcagtggtattgtgctctggagctttctaaagtggaaatggagaggtgaacctggggcctagagcagaaggaccttctgcttatcaatccttcctctgattgataagtgaaatagaagaaatgtctaggtatctttcttcctagaaacgcttgatctccctctcccctcaccacagtgggttgagggccttctgtgactttggacagagcactcaatgcactatgctgcaatcttggtctcctctactcagttgctggcaccttagacccagaaccagtatcatttgcttctgtggtcctagcctccccaacagagccaggcacatagtagttactcagtgtttgtgggatgtgtgatgaaaactgctgctagctgtcagaagctaccaattgttgtgttttcctgggtcatgctaacgtgactcatgagactgtgcttggagttatttcccaaatagccttcgcaccaggagctgtccgctcacactcagttgttcctctgaacagctgacggaaggcgtgtggtggtgcagaggtgctggagaagagggaggctggagccacacaggagtggccaggggcagtgcagggaccctccaaaggatcctgtcattgacccatcaggtccaggccgcaagctctggtcagttccaagtctctcttctctcctcctccttactagtccgggatttcctgctttcctttcatttttcaaccctattccatttgatctcttgagcctttgtttcccctttagacttgctactgagttgatcacatctttccagttccccttttcctccctgaaccctaaatccagccccaggacctcttgctttgtgtacttagtcatgtgtattgatttgcatctcctgctcattcttgtggaggagcagagggcagccccattggcaagctctgggaaggggatccaggatctcggtgccttgcagtctccactcacggaccttgagttagaccatctctcccattccagatctcgcccaaagtccaaggaccctttcttttgttcatccctccccacctacctcttaagactggagctcattaaatgtttaccctcctgcgtatgtgtttgttctactgacagtcactagggtggttctcttccctgaggcagttttgataggttttgaatggacattgggtcaaatggacttcactccatagatgcccttgtgatagtagacactctgaaacatctttgagcctcagtttccgtctctggaaaatagaggtaataatagcatggccacctcccagggctgttgcgaaggttgagtaagataaatcaagcattcagcaaagtgcctggcacaaagtttatggcaacgaattttattccaaaatctaggcctgaacgagcaattaaggcacaatgagaggtttaagtagtgtccccaagctgcgaatgtgcccattcatccattctccctaaggctgaagggctcttcaaaaatcaacacttaagacatatattttctgtctgttgacattttcccccctatagacaataagcaactcaaggacagggactgtgtcttattaatttttgtgtcccaatgcccagaacatcacctgccatcagtatttgatgaaacaatgaacaacaaatgaatagataaatgaacaagtgaatgagcaagcatctcaaagtcctcctgactttggaggaggaaaagtctggaaagccttatcttatgattgtttcctttcaaacgggtgcccagcaccccaagtgttgcaatggaaagtattcatgtagttcttattgctgccaacaaacagcgtggtaaactactgtgtaccaggcactgtgcgaggctctgaaattaccaaaaggattacaacctggccttgcccttaagaggtttagaagctagagagagacacagatagttgctgtaatggttgcagtatgggagagttttaatagcggtataaagagaatgtctggaagcccggaagaggaagtgatgaattctgtggaatggtcagggaaggctttaagggcacatggcctggacctggaagcatcccttaggaatcgctgctttaggactgttgtgaggcacaggtgttacactgagaactcggtttgaataggtaggatgaggttggacttaagggactgttgaaaaccgggtaaaggtacttggactgcaaccaatctgtctcacgctttttcacaggaggaaccaaaagcagaggagactaaatgggagctgctggggatctaggacattgtgtagagcagcctacttgttcagaatttcctggaagtcttctgttctgtcctaaaaatacatgtgaattttgcatcttactctgtaatacaggcatatttatttaatgtaagaatttttttcccacccaagccctaagtaaaatcagtgtcccaggaagatgccccatcatcatgccacagctttgtcagactcctcggcacaccaacagtgccctggactgggtttgggagcattggcaatagccgtcaaaggttctggggtgagatgtggcacacggaaagctggtgtggtgggatggaattctgagctcttggcggcattcatggtcccaggggatagttattgcctcaggagaaatcaagtcaaattattggctttaagttccaaaataagttcttaaagctcacagcagagataatgtccttggagagcgaggtttttgatttgccagagaagtattttggaatacagaaggttaattcctaataggatctggtcaaaaagttaatgctagaagttagagtgaaaaaaaagagaaagaaatagaagaaccaggccaccaagtctgcaaatcagataaaaggatgccctggccaggacaggagcttctgagcagaaaaggacatgttaaaatgtggttggtccctgcccttctgggagccggagagaggcagatatcactcccagaattagctggatattccatgagttctaaatagatttttacttgtgcaggggctgtgggtggtacatgtggagcagagaagaatttctggagaaattcttctggagagtttggctgtgtaatgggcttgtactgtggtatgacgcatatttctggagtttggcaaaccccagaaatatgtgccatgccttagtgaagtgggggacgtaagaggcggcacgtagggacccaaggcagagggcccagtgaaaggcctgagttttccttaactccagacaaagatattggaaatctaagtggactacggcataagaccagacacctatccccaccccaatacaatgacacaaccgcaaacctgaaatacatcccgggaagaagagggaatggagaagacactggatttaagtgaatttaaacatgaaatgactgaaaattctctatgtttttggccatgtggtggaaatggaagttggaggtggaatagaaatataaagttataattgttgcagttgttggccttggaaacagttccgcatccacagaggtctagatggttccacagtttttggaagactgtgctgacagtagagttcaggatggagggagaagggaggcagaaagggagatcaggcttccaggaaagatggaaagaagtgaacaggaggcctctctccaccacactttgggaccaaatgttccctggcatgaaggagagaactgaacagatgaaagggaaaataaacagtggaagtcatcctgtccaggtcccaaatgcatccgaagatttctgggtgctatcagccagccagtgttaacttgtctctctacggtcatcctttggaacaagaggttgagctatattaataagaggcaatgtttcagagtggggctgtctgggagatgctatgcaaatcactctgaaagccaggacttcagctactgtcccagccatagctgctagtgccagtttaatgtggtggccccatttgtgccatggctggagcccaagcaaacattactcagagaggctaagaggcttcttggccaagcgaaactgcacgtgacctcttccaagccaagtaagaagcactagcccgaaacgggaggtgccattgcttggtctctctctgataaattagctgtcaaacttactatggtatataattcgttgttcaagggatttggaaaaacacgaccaacatgacccaaagatctcttcccttaaatcatttttttttttttgagacagattctcatcctgttgcccaggctggagtgcaatggcacaatcttgactcactgcaaccttcacctcctgggttcaagcagttctcctgcctcagcctcctgagtagctgggattacaggcgcatgccaccacacccagctaatttttgtatttttagtagagatgggatatcaccatgttggccaggctggtctcgaactcctgacctcaagtgatctgccccccttggcctcccaaagtgccgggattacaggcgtgagccaccacacccgggctttaagtctttaagtgttcaccaagaatcgagacctaggaacatttttttcctgtgtctcagactgaacagagggcagtagttttcacctgctttcccaagcagctctaaatttgttttttagaatttgaatcagttggctttcacgtgtgcctaaaggaaggagagaaatatggaatgggcagagagggatagaggtgaaaggaactatgagtgggtctgtttttcggagacctctgaaactgagagtggctgcagttttaattagaatgtaccagacgacgtgccagtgcctaacataatctttttctactttgttatcctattaaaattcgagaaatttcaaagaaaaggaactggtgcttaccccacttctaatccaatattacagctcaaacattactgccaaattccagagaagaatcctaacgatgtggtgatgccaccaatcccgagtctttttgccaggtcttgcttgcctctggtaagagccacaatattaccccttcgcttcctcgccccctctgactctccctgcctgtagctgggtggctgtccacctccctacctcgctaaaaaaatgaaacggcagatcctgtggaaaactggagattacaaaaaggaacaggctccattccaagctgtttcattttcttctgccttttcttttcaaaaaacacttatttatttattttctcacttaactgctataaaaagaaaatatcgctagccactcacagatgctggcatcccaattcaaggagattggattactgaagtctttgcagaacaattgctagacaaaaaggtggtcggtgaactccaaggaaattaaatacctttatcttgaaaaacatgagctcacaatgaggcttcaaaggaacataaatacatcaccaggctgtgaaaatcagggttccctttcaagaatggaaaagaggccagtggcattgactcacagaatccttggaaaacaggaagtttgctgtctggcacggtgggaatggaagtgtgagacatcttagcaagagtgggggtgagtgatgggagtggagggggccccagggatgcttccctctctctttcttctcatgggatccagcgtggttatcctggttctctggtttctctggagagagccgaggctggaaacctgaatatgggaatttagatagtgtttcagagagatgctgtggaggaagcctctctctgatcaaattagatctatttttgagagagagaaactccagagggatttccagaaaccatgatcagaacagaggcaaatggtggccccatgagtctgcaacaaagcaggtcacaattgttaagacttcagctcactgttgtctggaaactgggccaagattaagccaacaaatcatcgattcaaacatgcgatgtcatgttctgaaggacagaaggggattttataagctgagctgtaactcacacgtagaccccctcacctctaccctgtgtccctctagaggttcccaggaatgtgttcagtcattaggatgccaggatgagttctgtaatcacccccctgcagcatgagtggatgccgagtgactgggagagatggtgtggagtagacgggaggggactggcatcagtttagatccaggcacttccacttgtcagccgtggaaccttgggcaagttacctaactcctctgcaccttggtttctgtgtcaggaaaaatggaggtaagagtagtgcccatttcacagggtaactgtaaggattgagttaaaacatttagcatgctgactttgctcatagtaaacactcataaaggtcagctttatatttatacagagcattcgctttggaatcaaattgatctagaattcacgttagttatgaaaacatgaacaacctaagttctctgaatttctctttctttaactgtaaagtggggacaatgggccttctctatggtgtttttaacgataattgaatgagatagcaaatgaaaaatgaggcacttgagctcatattttgatggattataagcaacctcccatagctcgtgtttggataaattgcaaaatttatcacatacctctcccatccctcttctagtttgagttccttttgcctacttttctcctattattctctccagaatgtgctaggtctagtcaccagatgccttggtgaatacaagaagaaatggcaaacttaccgtttcaacatgatgaatcactttgaattttctgggaagatcatgtaggtcagtttatatcggggcacataaagttgctatttacaataataagtccctggagatcggactatttgatacacttgcatggctataggtgaatatagttctgaaatagaaagtgcttgaaagccatatggttccaagaatccatgttcttgtccaatgctcttgatgagccagtgtggcacagagcttcagcacctagcatagtgcccagctcatggaagctcctcagtcaagatctgttgaccaatgtcaaagagcaaatacattgtctcttgctgggatctcgtggcactagtcagtcctctgtgcaagtggattctctgcacctgcctccatggcttttgtggcctctgccttttttcccagccttccctcactttttgttcaaaaggagctttccctctgtattttagttgcagatttccacagtggttcgtggagatatgtgagtgttttaagggctaggacatgagtgtacctgaatccaagaagtggttattagccagacagaaccaaaggaagagcaagtgggtgggtggagattcacatctcttcacaggtgctctcttccagggtgccattcccctttgtagttcaagagacaaagaacattattcatttgcatttgtgaactatcattttttgggcaaaatatttgtgggcaatctgcgggtgacaccaaagttagtatttagccaaccaggagtttgtggggagagcgtgattctatttcagtgaatgcaactgattgctggggcacagctgagcctcagagactcaagtgtcaggagaaagtcccagtttgtaaagccatctgcctgcatggtttatgtgtggtcccatctgaagaagggaaggaaagacatgactagatgtcttcccagtcccccttgccattgctgaggcatctgtgagtgccgcgtgggccttgtaggctggagggagtccacatcaagggccccttctgatgaatgtcgatgtgctgtggaaggcatttgacttctagagaatgactgatgacagtgttaaatggaactgctgcgctctccgaactctcccttcccactccccgctccatctgtttttcaactctgactctgccagcaatctattcttgcttcctctttccaataacttcctcaaggcacgaatggtatacaagccttgcttctatgaggaggaggccactcagccaggaatcaggatgctggagccaacacccatgattaacatgctggccatgaaatgtgagaagctgggaaagaaagactatggggtgtttcagtgactcatggtttctaccagcctcctgttaaacctcaactcccctcaaagctttccctgatctaataaaaattatcccagtgcaggccacatgcctgttaataactctcccaatacccccacccaatacaggcggtccatgttgtgaattgctcatgtcaatattcagtcccctttagccatcactcagtacagtgtgggccatcttcctctgtgaccaggctggagcactcaaccagggcggagcactcaaccagggctgtcatgttttaccgttatttcaaaccaaatttaattaaaaaggaatacatatgggtccagagcttttggtaatgcagccctctgcatctggaatgtctttatcctctttctttctgctcattctttccacaaacatttactgagctataatgggccaggtaccatgaccgtgaggttatagagttgaacaaggcatggttcttcccctcaaagagctcacagtgtagtgggaaatccagatatataaactagtgtattattttatgcataatagtgataaacaaggtattattagtaaaacacaaaagtagtatacctaaaagtcaggtaagagtagagaaggcagcctggaggaagtgacctccgagctaagtcttaaagcaaaggttaaggttagccagatgtgtgtctggggagtaggggtaggttccaggcagaggaattaacaggagcaaaggtatggaaggtaagagcaacgatgctgtgtgctgggaactataaacaattctgttacttgaggatgtgtcacagttagattttgcatttcagaaagatcagtgaggcaactgtgtagtgtgcagagttgagaaggaaacagctacaggcagggaaatagttttaaaggctactgcaatagtccaagcaagagatggtgggtgcctgaactagggaagtggcaggaggaatagggagaagggtaagaaactgaaaaatatttaggaggcaaaatcagcaggacttggtaatagccaagacatggaggagaggcaagagaccaaaggtaggaaaatgagaagaaaatgtgccccgggccaatcaaaggagattgaggagattggaagagagcaatgagcaatggctttataaaaagccaagatgggagtgtgactgacagtgtcaagtgctaacaaaggtcatgcaagatcaggactagaaaatttccattaggctcgaaacaaaatgttcattggtgaccacagcgagggtggttttagtggtgcaagacaaaattgcatggggtgaagattgaatagcaagaacaaaagtgtattcaaaacagaattattttctcctttagatctcatagacagaattacttggagcttaaaagctttttgagtgtccaaattatgtttgaggtctgaataaaaagtactggcttcagaatgcaaaaaggaaactgcaaaattaaatgaagacatgtttaattaaatatctccaaaatgtaacattgtttcaacttcattaatctttaaatttaatatttgtaaaaacttcattacatgtagaaataattttttgattagatttttaactttgcaacattcttttgtatgtatgtgcaatgattgctgagaaagcacagccagttgtaagttaactgtttcttgccactcagtaatatcagaagcaaaaatttttaaatgcatttaacataagatctgggtgcattttgttctacttccttttatgtgagatggctcctccaaatgtaagtgtttttaagggcttttagaaggtcttaaaataattctgatgtagaccactctcaaaaagctcggccatggaaggagagagaagtgttggattagacagagttggagagagtaaggagaatttctttgtcttcaaggagggagaaacatgagtatgtgaatgtgctgagggagagagccagtggagagaagactggaggaggaccagggaggtgactgatagggaggcagggggcacagctggaacacaggtagcagaagaagacctaaaggggaaagaaaaccccctctacagaaacaagaggaatgcgagaccctctgcaagggggccttgtcctgttttcttttgtttttgtttttgagatggagtctcactctgttgcccaggctggagtgctggggcacgatgtcggatcaagtggcagcctccacctcttgggttcgagtgattctcctatctcagccttccgagtagctgggattaacaggtgtgagccaccatgcccggctaatttttgcatttttagtggagatggggttttatcatgatggccaggctggtctcgaactcctgacatcaagtgatctgcctgccttggcctcccaaagggctaggattacaggcatgcaccactgcatccagccccttttcctgttttctatctcgagcacaactattgccaagtgatgggggcatcctgtagactctcagcagtcacttggggactccagttacctgagcaggtggccatccttcatgtcaccattgtcatttccccagtcatgggggatgtccacccagcctccctcgacaggggctggccagagaaggtaattcatccgtgttgcacagatacacatcctaatactccagttctcaccacccctaaatctgtgggctgaagtatctgcctacaaccccagccagctccttggtacattcccttttaagtgtccctttttcatcccctacttcttgtggctcttgatgctcccagagtgaaaactttctacccaaatggcccaggttagagggacaggtgttaacgtaagatgtgggtgcattttcttctactttcttttatgtgagattgggcctccaaatataggtgttttaagggctttttgcccatttaagcaccttccccctggaaggtagaattgagtttttaaatgatcccctatttttgattgttcaaaatacaggattcccacattcacacaggtactcaagagttgactgtggtcctgcagatcagagtgtatagttcatttggtgtgttcatcatgtgagtcctcagagtcgttccaagcagattttcagttgtaggcagggacagctactgcactgtgttattttaaaaacaaaagtcagacatccacttagggctttgtaaaaggaaaccctgggcatactgaaatggccatagagctatttttccagctttccaaggtgcagaaggtagcgtcgatttctgatctggccctgtgactcatctcatagtgccgtgcgaagctgactgccccgacactgacgaggctccatgttctgtgaggacattactgactgaacattcagatgtgcaagcattcctgaaaaacacgggacacaagagaccctcctggatgaaagatgccttttgatttctgattgtggccccagttgaatcagggtgttttgtgtttgggtttctctaatgccaaaaataaaaagcatttaattacatagctgaactcaatgtttgacacagtggaaatgaaacagccatatcatatcctataagtatttattgactatatactgtgtgccaggtatcatgctttgcaatgaggacatgaccagaaacaatgtctgactcccaggaacttacatacttgcacaatgcttctaaaattaccaatttgtaaactaattttaggaatgactagaaaagaatcacctgtgaaacttctgtaaaaatacagattcctgggccccatgtccagagatactgattgagtaggtctggggtaaggactgggaatcaatatttttagtcagctttctaggcagttctgatggcagctggtttgtgaaccactcgtttggtgggataaaaagttttactttccaaataaatattttagtaacatgttgacaaagataggtaaatataactttttctatccatggtttggtcaaaacagttgcttttatatcacataaatacaatgttaggaagattgagtaaaactttaatgaaactattagaactgacaggtattttggtgtcatgtctctctctataagctgtcaagagtttgcccgagcccttttcttaaatggtcctcacctcccagccccagacaccctttggtaggcttcttgccagtgtccttgattgatggcaagatctctctcttccattttatttcaactatgctgcattttttccagataaataattaaatatcttcaaggactgggtgtctacatgtcaagtagatgcatgggtgtctacttgagcatctaccatactcaagttcttgtttgaatgattttagtatttttgataaaatgattgtgtcttcctgatcttttacaatatttttcatttgttatcactttcttacaggcctgggaatggagaatattggtggaatctttgtggttcttatttgtggcttaatcgtggccatttttatggctatgttggagtttttatggactctcagacactcagaagcaactgaggtaaactttcaaaggggtatgatcgatcgtgttggcagatggggtgaagttcacaggctcatgcacatataaggttatttcagacgcttaccacaggaagtgcagcaaagagaatcccagtgcccagcagaggggatttggatcaatgcttcattacttagtaattattatgaacaacaaagccttctagaactatcatttaagatatagttgagaaaaataggtgaaagtaccaggttactatggaaaagacaacctcagtcctttcattctgagtatgtttttgccttgcagggaaagatccttagagatatcccgactcatgcgaacccaagaattttatcccccttctcggggattttgaataagttcaattccccagctgtggcttagagacagggttaacataaactttacccaggttgaacagtttgaaaagaaggaagaagactatgccactcttcttccaacccaccccagggaagatatataaatccttacatgttaattgcattattagattttttttaaaagttacattagcctctatctcagtctcccaactctgaatcttcctaaaaacctttcctaattggcactgggaaaatatctcacagcaggacaaacagtgcccctggaagtctgtggagtctggcctcacatggggccttaacacaacaccgcctgccagtcctggtccactgtgctcagcctctttcctgtctccttgtaggacttccacgccgttgcccattcctcaagcccctctgcttctgcatgcgtagagcttcattttacttcccatctcccaagaaatcaggagtggctagccctgaattaaaacccccactaaacatctccccacagctcagccaccctgcagctgcagcagataccccagtcctcctgctgtcccttccttgatcctgtctttcctcagctgctccaggattatcctcttttgcccctgtatttttttctgcctgctctttctccagtccaccattgtgaacgtgtctgccatatttcaaaataataggaagattactgttgctcttgctctatccctctcctcttccaaaccaaggggatccagctgagagaatctcagtctccatcacctcactcccgatttggtccgaaacccagggcagcctggctcctccctacccctgcaccgaaaggccgatgcttaaaggtctgacccctcccagtggaccaaaccaaagagaatctactgggccttattggactttggtgtgtcccttgatgatggggatactttctttcagaatccctcttcccttgccttgcgtggcacccagctctcttggttcccctcctgttgctgtctccagctttactggctttttccttttgcccaccccttaaaaggtggtggtcttatttattccctaagacctagttcaggtgttcccttccttgtgagtccttcctcatttctcctgctgtctcccagcaattggtcaccctccttcttcctgacaccagtgtaacctatgcatgaaccacttacacaccacgctgcagttattttggtatcagccccctactagagattgagctgcctgaagtaaagactgtgtcttttatccctgtgcttgacatgcagtagacagtcaataaatctacattgttatagtattgtcacatgtaatagattaggcaggtggtactgtttttattgtagttatcactagaagcacagagaggttaagtgacttgccaagagtctctgctatttagttaacaattggggggtgtgatgggggcctataatccaagtcgggaaaactaatgtaggccttattccattaagtgacatcacctttctgtagctgcctcacattttgttattctccccaaagctcacccatggtctggaagtatattgaaaaattcagcaagtagttagagcagtcccaatagctaaaataaagagtcagtgctatgttagcgatttggctgtggtagaacaactatgccattggtagaattggacgaaagaacattaaagaactgaggacttctgctcccatatggtctaggaaagtgtcctttcaactcagagtagagcactcaacagagcatgtacaggcttggagttgataggtttaggtccaaattcagagtcagctattagtcaatttttggcaacatacataacttctctgagcctccatttccacatttgtgaaatggatataataataatagtaatagtagtaatacaggcccatcggccaggcacagtggctcacgcctgtaatcctagcactttgggaggccgaggcaggtgaatcatgaggtcggcagttcaagaccagcctggccaacatagtgaaaccccgtctctaccaagaaatacaaaatttagccgggtgtgatggcacgtgcctgtaatcccagcttactggagaggctgaggcagaagaatcgcttgaacccaggaggtggaggttgcagtgagctgagattgtgccactgcactccagcctgggcgacagaggaagactcttgtctaaaaaaaaccaaaaacaaacaaacaaacaaaaatgcaggcccatctatattcttttttttttttttttttttgagatagagtctcagtctgtcgcccaagctggaatggagtgcagtggcaggtatcttggctcactgcaacctccgcctcccaggtttacgtgattttccccactcagcctcccgagtagctgagattacaggcacacgccaccacgcccagctaaattttgtggttttagtagagacagggtttcaccatgttggccaggctggtcccgaactcctgacctcaagtgatctgcctacctcggccctccaaagtgctgggattacaggtgtgagccactgtgcccagccctatcctgtattcttcatccacagttctgacacctaaaaagcttggagagttccaagttccttgtaagtttgatgcaaatgcactcagcggcggcgtggcttggctgatgtttgtggcctttatctcacacggtgtgagatgttgctacagaaatatgagcgggtttgaattcaagtctgccccagacccaccgggtgtgatacatactctactgtttgtgctttgtattaccctcctcttgttttggttatcatgaggatacatccacctcctgctataaccagttggctaaaagaaataagaatccttagcctaaggaacagaatgttcatagagacatggtggccttttcaaatacttgagagactgacatgtggtggaggaattatttatttagtaggcttcaaggtccaaacttagctgggatcaatgaatgaaaatttcagggacagaaattgttagctcggtaaaaggaagcagcatttaatggaaatgtgcaaaaaaaaaaaaaaagtgagatcattgtctttgaaggtgttcaaacaaagattggagaccagctggtggggctcttgaatattatggtatggagggtgtttgaacattaaatgggagtggagtgaggagatggactgaaaggcttttatcatcttcatacttaagatgacacgattctgtgaccgctgcccccttcatccctcatcccagcggactcgcagggggcccacgggggctggttgagaggctgggccctgacctcgctgtctcctccaggtgtccgtctgccaggagatggtgaccgagctgcgcagcattatcctgtgtcaggacagtatccacccccgccggcggcgcgccgcagtcccgccgccccggccccccatccccgaggagcgccgaccgcggggcacggcgacgctcagcaacgggaagctgtgcggggcaggggagcccgaccagctcgcgcagagactggcgcaggaggccgccctggtggcccgcggctgcacgcacatccgcgtctgccccgagtgccgccgcttccagggcctgcgggcacggccgtcgcccgcccgcagcgaggagagcctggagtgggagaaaaccaccaacagcagcgagcccgagtagtcccggaggccacaggacgcgcagaggccgggaggggcggggcgggcgctgctgtcagccgccagccggaacttgtacagcgtcgacacctctccagatttcggatccagtcacttttcaaaaagatcaaggagcctgacgccccagccagagaccgcgcccggtcagggagcagggtccacccggaaacgttgcacccaaagggcaaaggacggccctccctcctgggcacaaggacccatcttctcccagtgggtctttccctctcgccaaaataacaagagtatagggtggggggtccctacccagaccagtccaatgaattggtggaatcatcagttgaatttccccctagtcaggggccaatgtaccctccgtctagttcttacagaaaaaaaaaaaattaaacagggaagtttttcttttctggatttgtatatttttgttaatgttcttttcccttttctttcctcctctccttttcttctttgtcatcttctcagtcctgttaatttgttttgtgttttttggagggggaggctgggttagggaatggaagcctaaataatccctatttcttctttttcctgaattttggaatattgcgttaccagtgcatccgatttcaggtgcttaactctctgtatggtgactgaggggcctgcaggagcacaggagaaggagtcttgggaagaatcagatggagagtctcaaaagtccattgcagtaaactttgagatgccaaaaagcaattaactcatcctatactcagaccttgaaacgcctggaatgtcaagggttaatctgtcttttctttccctttctctttctgactgtcactattactgggtttgatttgatctttttgtgaatgtagtctctgaagacagacaggggaggagaacagaatgcacaaagtatcctaggactttgtttaaggagcggaaagagcagatagaattttcccataccatggccttggcttccggtggaacgtgccgttcacagaggcggaaggactgggccaccccgttggtatggtgcatactttgtcaactgcatctcttttcaaccaaactcaaatgagtggctgcctatgaagccagacccccaagactatcatggattgggtggtttcttgctacttagacgtgagacctgggtgcaagtgtatgtgtgtgtatgtgtgcgcgcgtgtgcgtgtgtgtatttattcaacagaaagaccttaagtattcaagaatttgctaggttcctgggagagaggtggagtctcctagtcaatacacgggcctgggaaccaggaactcttgagtcgtaacctcagcttgagcagtagccctcccaccttgtatgactttaggtaaagcatttaacttctcttccatctaccaaataggagttactgatgctgtccaggttaccaggtgactgctagtgactgctctccatgtgagaagtttgcagagtccagagcacacatctgatgggaggggcgaggctttctacagctgcttgacctttgcttggcttcactaattgggagtttcacgcagagttctcattggctgatggaaaacaaattctatgcaatttctgattgtaaacttagaaaattcagagagaaacaaacagccgctaccaaccacctccacctccaccaccgctgccaccaccttgaatggaattgtcctcacttttgttgctgttgcaaatgtactaaaataaagacatctttggaagatgacgagcttaattcatgtttttgccatttgggttggtcggcatcctctttatgccaggacaatcagttagggctgccgtcctgggggccaaatggtaccctgattattcctgtgagggatactcgttttgtcctcacctgacctcactcatgaatttgaatcctttatcttttttctctttaaccatcaaatgacaacaagctgtgcaagacacttgtgtctttttttaaaccttgccttgatcctcgtggagaaacgtggatttggtgggaagggcacccgaaggccagctgacaacaaaccccaatggtgccactctgctccaacctgcagctccatcctatgcttctcacagacaacgtggttcctactgtcagatcacatttggggcgggaagggtggttttttaaaaaaactcgtttttatgagcaggctatcttgatcaatagcaaactttttttaatggattagtgaaataaatgtccccatgcatcatttatagtctgtttctttctccgtgtggaatcaagataagactgccagcactagacggtttctgttagctgctgagaccagggcctcaccttgctcaagctagtgggtgaatttgcaaccagctaatactcttccttggtttgtttccactttttatctgttggttgttggctttcttttccattctgtattttctatctgactctgtatactgtataaagcagttttttcttgtctgtttatctttcttcaactggaatatttacaataaaacagaaacaaatcctgaaatgttagtgatggatgacagctgtttgggtttagaaagtatggttcagtgtgtctaatatccaggtactagacttgaaaagcaaataaaatcataaacccactttttgtcttcccctccacctgccctctctgtctccttctctccacctccctctctactcccccacccgctttggctctttgttcagatcccagaaaagtctaggtggcttctttcaatttttagtcctaggagcctgagccaatccacccccccatccccaaaagcggatacatatgttaatgaagttcaggattcctagggttttgtcttcctaaatgcactttcacagaatagtcatctattgatacctagggtaactctagtcagatatcaccccagattccactgggagcttgaagattacatcaattaaaatataatactttgctttatttcttttaattgctttgcagggccccaaccgtcacaagatctcacctcagaaaccaggtagagtgtaagttgagcacggagagggccgaaaatcttttggcttcctctaatccactgctcatatgagaatattcttcctgggaacttgccagccagctctcttattggttaggtgagactgaaatatcatgataaccaatccacctggggccactctgtgaaagtttcttagttttggattccaaggagcttaattttcttttggaatccaagggggaacttccccatgttgtaggagtcaagtacacaaggccagaaaagggctggggcatttcagcaacaccagattggtggtttgagagaagcttgagagactcatttgtggccctcccaccaatggggtgttcacagcaaggtaaaacagtctggaaatgataagggagatttgagtgcctgactagttgtcagctctctcggggtaataacgaagaggcctgtttggaaaattcagagaaggaatcctttcataaagattttgcttatagctagtgcttcctatggggccttctcaaagagaaattaaagcaccatgagtaattcctttgcctttcggtgaatggtgactttctccccacaggcaggtccccacagtggccaaacagagagtgccctcaggaactgacaacctgcccatcctaaggtttgcctcaaaggctggggatagcatgctctcctaagacttttcccataggggaaaaagttgttactgggtgtggcttccaaaggaaaaaaaaaaactccgaattttagagcctacatggtcaacaagcttcttgtaatttgagggcaatcaagcaagagaagttccgccactaccgtaagaacattatcattcaagttttatgaatttcataccaatttccaaatctggagaatgaattaaacaaatacgaatgttaccattcaacaaacagcagaactaatgctgagatcaagaaagaaagaagtctatgaaggcaacgaagtaaaaaataagctctctaccagaagtggcagaaaattgaggccccaagaagggtcataaaaaaattgagcatatactatagctgtaggttaactaagcatatgcatataaatatttcactcaccaggatttaccgaagcatgtcagtgcattgtgactgatggtgtacctactggggacttgatcctatttacaagttagactagatacagatgatggatgacaaatccctccatcatctgtatctagggcaaaagatcctcctgtagaaaattagctgaagatcctgcccattcttcagtatgccttgtgaccaatcaagtgttgtctcttggttgtcagggaacactggcacttttccatagattggtgagtgacctggagagggtatttacctagcacccagcaccacattagatcttgccagaaatgagacatagaagcagtgatctatactctgcttgaaggaaaaaactaactttacctgtaagaaactgaaaaaaaaaatcacacaaaatataacaataaaagtgctacagtgtgtggtttggaatattaaccatgtagaaattcagaggagctcaagattctaagtagttaaaagagcaaaggaaggctgggtggaggaagcaggactgtttgtgtgtttgggttgttaattaattaatttatttttttgatgtctgggaaataagatcttgctcattgcccttggagtgaaatatggttaattcatgttgatgaattcagcacccctctgatgaaagatagtttgttgtagctgttgttttgttttcacccagttcgtccctttttgaggaattctggctctcaaacgatgcttcttcctgtttgctgccaacactagagattctcaccaatgtctcatcccttggcttctttaagttgtattagtggaatcagctgcagatacaaacagcctagccctacagaatacagaaaggctaactgaaacaagcaatgaaactgtctgaagtggattgggagctcttttcagaaaaaaaaaagatcaaagagttttaaaattgggggaaggagtaagaacacagtactgaaggtctggagccagtgtataaattaatacagaaccaaacgtccaaatttctgatgtacgggaacatttagaactgtcttccttttcagtccatttaaccatcctgttactcatagcacaagaagtctacctggaaaggtattctacttggattgttctgattcgcttcttagtagcttttgcattaaaaataataaaatgtaacttccatttccatcatctgtaatcctacagcaccgagtgggctacaaaagcattttaaatcactaagattggtcaaatgtgaaggtcaacggagagaagtcacaaacaggtggacagcacaggctgtcattaccaggagactgtgccctcaagctcaagtgctgacagaactttaaaacccgcttacggaggatcagatgagaaacagttcagtatagagagacttgaagtcatttttctttgctgatttttcccttcttatataaactaaactggtgtgtatgtgtaggagtttagcacagacatacaggttcctgccagtgtgtgtgtgtgcgtgcacggtgtatgggtgtgtatatggtatgtgagtgtgatgtgtgtgcatgagagtacgtagcagtttagcgtagacctacaggttcctgccactgtgtgtgtgtgacatgtatgtgagtgtggggtggcatatgtgtgtgtgtggtgtgtgggtgtgtatatgtgtgtggtgtgtgtgtggtgtgtgagtgtatgagtgtcagggtgtgtgtggtgtgtgtatgagtgtggtgtagggtgtgggggggtatgtgggtgtatatatgtgtgtgtgtcatgtctgagagcatgggatgtgtatttgtgtagcagtttagagtagacctacaggttcctgtcattctatgtgtgcctgtggggtcggaggtgtggggtgtgtgtgggtgtatttgtgtggtgtgtgggtatgtatatgtgtgtgtgtggtgtggtgtggtgtgtgtgtgtgtagcagtttaacacagacctacagcttcctctcagtgtgtgtgtggggtgtgtgtgtggtgtgtgggtatgtacatgtgtgtgtgatgtatgtgtgtagcagcttagcagagacctataggttcctgtcagtgtgggtgtagtgtgtgtgcaccaagtgggtgtgtatatgtaagtgtgtagtgtgtgtgtgtaagagtgtgtggtgtgtgtgtagcagtttagcacagactttccggctcctgtcagcgtgtgtgtgtagcgtgtgtgttgtatgatgtgtgtgcgtgtgtatagcaggttcctgtccatcctcctaatgtccctttcaaaagacagaagactcttcccattatcgcttcagccttttctctgtgcttctaggtaacactgctggctttagtcttctggcttttggaggcttagttctcactgaatggtctttgatgtaatttatttctaaggtgaatgtatatgtagatgcatgaggtaaaaggtgtttttccccattcccagatgagtgataagatgtctgagctgacttcttaaaacctattgccactctacctccatcagctgcaaaagaaagttcctctagcattagtaagtgactagaaaaaatgtcgtgccgatagtgtgatagaacacagccagaaagaacaagagcggtgcaggccggctttcacttacactccattcttatcatcaatagcctcatcattttaagcagaaaatcattttcaaaaagctcagacaacgaaattgttaaaatttgagtggttggattgaccaataaagtacagaattcagaaacagtcttactcaggtagcctatctcttgttttgaataaaacagcaaatttgctaaggctgtcattattttcagaggattcaaaggtctccccgattgggcccctgctgatctttcaaccttctcctgacacttcttacctcccttccaacccacacagcagtcaaaccatatcccccactcccccatactgaccctccacatcccatgttctgggcctttgctctggaagttcctagctcctgggatgcccttcccattcatctctacactgccaaagcctacccatagttcagatctagcttaaataccacctcccttgtgaagtcttcattgatccccatcaccaagggagtaagcaataacctctccctctcctgaacattctcaatcttttttttttttacgacccttatcacctgctacattaaattacatgtgacacatatgctggcccccttactcccacctaccacagtgaggtctttaaagtatagagaaaatccttttttcaccttttatctttcacagtgcgtaggattcctggcacatatttggttcccatgaatgaatgcatgaatgaatgaggcaaattcaactgagagcaaatgcacataaaatgcagcaggtgtgaaactgagtggcaggatatgctaatacacctttgatttaaagcaaccatgcaaagaactacttaataatttataccagacaaaaatatgacttcatttactttactgggcacgaacctagtggagagagagttgataatatatgtagagtggttcagagttggttacaaacggtaggtatgagggaatgttttcttcccactggctgcatgccttctatacaggttagaagaattcagcctcccaactcccaagccagctttgaaaaaatcaatcagccttctcccttctctcttcattatcctcaaaaagtgatctgtgctccaaaataaaattaccaaaacttggttactgggttatccattttcatataagtccagcaaggtggtgcttgctcagagcagatgcagtcttccttaccaaaataatcaaaatcaatctacgtttcctccttagttgccaggaaaacagacacatttccccttggtggtttgcttttaaaatgtgaaacatcatcatggtttgaagggcaacaaattatagctctggcatttagagtgattaccatattgggaagtctggccagttttgacgagtttagaaaaatgctgcaatttttctaagtgttagtgtttggcttaaaaaaaaaaaaaaagggagagacactgagagaaggaaccagtatttctccaggatctcctacctgccaaaaacatttatttatttaatccttatgatagccccatgaattaaatgttattttcaggagagaaaatgaagatttctgaaagtgaaaatgacatgcccagagtgccacagttagtgaaaaagcttcaagatgaagggcaaagattagagccctgttctctctgtttccatttccaggatatcttttattgcatcacatcacctgatgccagaaaggataaaacccaggcaaggttccaaatatgcttgattttttaagagctaggactcttgctttttgttgttgaagcagacaaatcactttgattctataactttgttcacccctcatcttttacattagtttttgagacaacctgcttccataaatgctcataaatgatcagtgatgctaaagatacaacttaagagatggcatttggctggtcgaggtgtctcacgcctataatcccaacactttgggaggccaaggtgggcagattgcttgagtctaggagttcaagaccagcctggacaacatggtgaaaccctgtcactacaaaaaaatacaaaaattagccaggcctggtggtgtgcacctgtagtcccagctacttggggggctgtggtgggaggatcgcttgaacccaggaggcagaggttgcagtgagccaagatcatgtcgctgtactccagcctgggtgacagagtaagactttctctccaaaaaaacaaagaaaaatgatggacttttactagaagaagagtttttattaggttctctgacaatgtttcttattattaatagcaatgagggtttatggttttagcatagcacacatcaactagccaggacagtcatttagttgacgtaagctaccagctgctctgatttttcttccagagaaagaaagcaatattcagtgagcagagataacaatctaattgaggaaaattgtacacaggcccttagagatctagaagtttgccacccagattggtaaaccagaaggaccctcccacagtcagtgcaccattttagtttattccccgaccattaggaccatacccaagcccttgagaccacaaaggtaatctatcaattgaaatccataaacatttattaaatgctacatttgaattggtggagagggagagagctttgtggatacagctgagaggtatgaagatggatgaagccatgtggaaaaggttgtagactttttcttctctgtagcccctagaactaatggtgcatattgctgagatagagaataaagatcaatgaaagaaagaacctttaaacgaagcaacaagctccttatcactgtaatatgtgagttaatgttctcagagttaccttaacaaattaagaatatcgaagaagattattttattttgtgagaggtcagactaggtgacttgttataataataatcatataagagtagtataataacaatagtaactgctacattttattgagtacttaataattgccagatgaggtgctctgttttatatatgctattttaatattcatagcaggtagatattattttccttatgttacagaaaagaaaactatgtcacttggtcagcatcaatgtggaagtcagtggtggaattaggatttgaacacagctggctggctcaaaaggtctcttttttagtgaaagtccttttcaacccacccttgacatcttatgattatcaggccatggggcctgccttcagactaacattcaaaagaggagacaaaagtaccaatatgcgccatgtaagagaggagacaaaccatagtgcaagggggaaat

SEQ ID NO: 129 - DNA, 2789 bp, Homo sapiens
ctgctatcttggacgaccccatggagtgcagcagaggggagcggctctccatcaccctggccaagaaccgcatcaaccgcgctcctgagaggctgggcaaggccaaggtcgaagtggacatctttgagcttctcagagacagcgagtacgagactgcagaaaccatgtgtcagatcctccccaagggggtggtcgctgtcctcggaccatcgtccagcccagcctccagctccatcatcagcaacatctgtggagagaaggaggtccctcacttcaaagtggccccagaggagttcgtcaagttccagttccagagattcacaaccctgaacctccaccccagcaacactgacatcagcgtggctgtagctgggatcctgaacttcttcaactgcaccaccgcctgcctcatctgtgccaaagcagaatgccttttaaacctagagaagctgctccggcaattccttatctccaaggacacgctgtccgtccgcatgctggatgacacccgggaccccaccccgctcctcaaggagatccgggacgacaagaccgccaccatcatcatccacgccaacgcctccatgtcccacaccatcctcctgaaggcagccgaacttgggatggtgtcagcctattacacatacatcttcactaatctggagttctcactccagagaatggacagccttgtggatgatcgtgtcaacatcctgggattttccattttcaaccaatcccatgctttcttccaagagtttgcccagagcctcaaccagtcctggcaggagaactgtgaccatgtgcccttcactgggcctgcgctctcctcggccctgctgtttgatgctgtctatgctgtggtgactgcggtgcaggaactgaaccggagccaagagatcggcgtgaagcccttgtcctgcggctcggcccagatctggcagcacggcaccagcctcatgaactacctgcgcatggtagaattggaaggtcttaccggccacattgaattcaacagcaaaggccagaggtccaactacgctttgaaaatcttacagttcacaaggaatggttttcggcagatcggccagtggcacgtggcagagggcctcagcatggacagccacctctatgcctccaacatctcggacactctcttcaacaccaccctggtcgtcaccaccatcctggaaaacccatatttaatgctgaaggggaaccaccaggagatggaaggcaatgaccgctacgagggcttctgtgtggacatgctcaaggagctggcagagatcctccgattcaactacaagatccgcctggttggggatggcgtgtacggcgttcccgaggccaacggcacctggacgggaatggtcggggagctgatcgctaggaaagcagatctggctgtggcaggcctcaccattacagctgaacgggagaaggtgattgatttctctaagccattcatgactctgggaattagcattctttaccgcgttcatatgggacgcaaacccggctatttctccttcctggacccattttctccgggcgtctggctcttcatgcttctagcctatctggccgtcagctgtgtcctcttcctggtggctcggttgacgccctacgagtggtacagcccacacccatgtgcccagggccggtgcaacctcctggtgaaccagtactccctgggcaacagcctctggtttccggtcggggggttcatgcagcaaggctccaccatcgcccctcgcgccttatccacccgctgtgtcagtggcgtctggtgggcattcacgctgatcatcatctcatcctacacggccaacctggcagccttcctgaccgtgcagcgcatggatgtgcccattgagtcagtggatgacctggctgaccagaccgccattgaatatggcacaattcacggaggctccagcatgaccttcttccaaaattcccgctaccagacctaccaacgcatgtggaattacatgtattccaagcagcccagcgtgttcgtgaagagcacagaggagggaatcgccagggtgttgaattccaactacgccttcctcctggaatccaccatgaacgagtactatcggcagcgaaactgcaacctcactcagattgggggcctgctggacaccaagggctatgggattggcatgccagtcggctcggttttccgggacgagtttgatctggccattctccagctgcaggagaacaaccgcctggagatcctgaagcgcaaatggtgggaaggagggaagtgccccaaggaggaagatcacagagctaaaggcctgggaatggagaatattggtggaatctttgtggttcttatttgtggcttaatcgtggccatttttatggctatgttggagtttttatggactctcagacactcagaagcaactgaggtgtccgtctgccaggagatggtgaccgagctgcgcagcattatcctgtgtcaggacagtatccacccccgccggcggcgcgccgcagtcccgccgccccggccccccatccccgaggagcgccgaccgcggggcacggcgacgctcagcaacgggaagctgtgcggggcaggggagcccgaccagctcgcgcagagactggcgcaggaggccgccctggtggcccgcggctgcacgcacatccgcgtctgccccgagtgccgccgcttccagggcctgcgggcacggccgtcgcccgcccgcagcgaggagagcctggagtgggagaaaaccaccaacagcagcgagcccgagtag

SEQ ID NO: 130 - protein, 916 aa, Homo sapiens
MECSRGERLSITLAKNRINRAPERLGKAKVEVDIFELLRDSEYETAETMCQILPKGVVAVLGPSSSPASSSIISNICGEKEVPHFKVAPEEFVKFQFQRFTTLNLHPSNTDISVAVAGILNFFNCTTACLICAKAECLLNLEKLLRQFLISKDTLSVRMLDDTRDPTPLLKEIRDDKTATIIIHANASMSHTILLKAAELGMVSAYYTYIFTNLEFSLQRMDSLVDDRVNILGFSIFNQSHAFFQEFAQSLNQSWQENCDHVPFTGPALSSALLFDAVYAVVTAVQELNRSQEIGVKPLSCGSAQIWQHGTSLMNYLRMVELEGLTGHIEFNSKGQRSNYALKILQFTRNGFRQIGQWHVAEGLSMDSHLYNISDTLFNTTLVVTTINPYLMLKGNHQEMEGNDRYEGFCVDMLKELAEILRFNYKIRLVGDGVYGVPEANGTWTGMVGELIARKADLAVAGLTITAEREKVIDFSKPFMTLGISILYRVHMGRKPGYFSFLDPFSPGVWLFMLLAYLAVSCVLFLVARLTPYEWYSPHPCAQGRCNLLVNQYSLGNSLWFPVGGFMQQGSTIAPRALSTRCVSGVWWAFTLIIISSYTANLAAFLTVQRMDVPIESVDDLADQTAIEYGTIHGGSSMTFFQNSRYQTYQRMWNYMYSKQPSVFVKSTEEGIARVLNSNYAFLLESTMNEYYRQRNCNLTQIGGLLDTKGYGIGMPVGSVFRDEFDLAILQLQENNRLEILKRKWWEGGKCPKEEDHRAKGLGMENIGGIFVVLICGLIVAIFMAMLEFLWTLRHSEATEVSVCQEMVTELRSIILCQDSIHPRRRRAAVPPPRPPIPEERRPRGTATLSNGKLCGAGEPDQLAQRLAQEAALVRCTHIRVCPECRRFQGLRARPSPARSEESLEWEKTTNSSEPE

SEQ ID NO: 131 - DNA, 3029 bp, Homo sapiens
cagatactttctgagtgcctactatgtgccagcctgtgctaggcactgaggacacaggtggaaaagcccgaattgctccctgctctcctggcgctcatcaccccggagagttatgtcatgcccaggccagcagggggctccatgaggattcatagaagatgccccgcgtctcggcgcctttggtgctgcttcctgcgtggctcgtgatggtcgcctgcagcccgcactccttgaggatcgctgctatcttggacgaccccatggagtgcagcagaggggagcggctctccatcaccctggccaagaaccgcatcaaccgcgctcctgagaggctgggcaaggccaaggtcgaagtggacatctttgagcttctcagagacagcgagtacgagactgcagaaaccatgtgtcagatcctccccaagggggtggtcgctgtcctcggaccatcgtccagcccagcctccagctccatcatcagcaacatctgtggagagaaggaggtccctcacttcaaagtggccccagaggagttcgtcaagttccagttccagagattcacaaccctgaacctccaccccagcaacactgacatcagcgtggctgtagctgggatcctgaacttcttcaactgcaccaccgcctgcctcatctgtgccaaagcagaatgccttttaaacctagagaagctgctccggcaattccttatctccaaggacacgctgtccgtccgcatgctggatgacacccgggaccccaccccgctcctcaaggagatccgggacgacaagaccgccaccatcatcatccacgccaacgcctccatgtcccacaccatcctcctgaaggcagccgaacttgggatggtgtcagcctattacacatacatcttcactaatctggagttctcactccagagaatggacagccttgtggatgatcgtgtcaacatcctgggattttccattttcaaccaatcccatgctttcttccaagagtttgcccagagcctcaaccagtcctggcaggagaactgtgaccatgtgcccttcactgggcctgcgctctcctcggccctgctgtttgatgctgtctatgctgtggtgactgcggtgcaggaactgaaccggagccaagagatcggcgtgaagcccttgtcctgcggctcggcccagatctggcagcacggcaccagcctcatgaactacctgcgcatggtagaattggaaggtcttaccggccacattgaattcaacagcaaaggccagaggtccaactacgctttgaaaatcttacagttcacaaggaatggttttcggcagatcggccagtggcacgtggcagagggcctcagcatggacagccacctctatgcctccaacatctcggacactctcttcaacaccaccctggtcgtcaccaccatcctggaaaacccatatttaatgctgaaggggaaccaccaggagatggaaggcaatgaccgctacgagggcttctgtgtggacatgctcaaggagctggcagagatcctccgattcaactacaagatccgcctggttggggatggcgtgtacggcgttcccgaggccaacggcacctggacgggaatggtcggggagctgatcgctaggaaagcagatctggctgtggcaggcctcaccattacagctgaacgggagaaggtgattgatttctctaagccattcatgactctgggaattagcattctttaccgcgttcatatgggacgcaaacccggctatttctccttcctggacccattttctccgggcgtctggctcttcatgcttctagcctatctggccgtcagctgtgtcctcttcctggtggctcggttgacgccctacgagtggtacagcccacacccatgtgcccagggccggtgcaacctcctggtgaaccagtactccctgggcaacagcctctggtttccggtcggggggttcatgcagcaaggctccaccatcgcccctcgcgccttatccacccgctgtgtcagtggcgtctggtgggcattcacgctgatcatcatctcatcctacacggccaacctggcagccttcctgaccgtgcagcgcatggatgtgcccattgagtcagtggatgacctggctgaccagaccgccattgaatatggcacaattcacggaggctccagcatgaccttcttccaaaattcccgctaccagacctaccaacgcatgtggaattacatgtattccaagcagcccagcgtgttcgtgaagagcacagaggagggaatcgccagggtgttgaattccaactacgccttcctcctggaatccaccatgaacgagtactatcggcagcgaaactgcaacctcactcagattgggggcctgctggacaccaagggctatgggattggcatgccagtcggctcggttttccgggacgagtttgatctggccattctccagctgcaggagaacaaccgcctggagatcctgaagcgcaaatggtgggaaggagggaagtgccccaaggaggaagatcacagagctaaaggcctgggaatggagaatattggtggaatctttgtggttcttatttgtggcttaatcgtggccatttttatggctatgttggagtttttatggactctcagacactcagaagcaactgaggtgtccgtctgccaggagatggtgaccgagctgcgcagcattatcctgtgtcaggacagtatccacccccgccggcggcgcgccgcagtcccgccgccccggccccccatccccgaggagcgccgaccgcggggcacggcgacgctcagcaacgggaagctgtgcggggcaggggagcccgaccagctcgcgcagagactggcgcaggaggccgccctggtggcccgcggctgcacgcacatccgcgtctgccccgagtgccgccgcttccagggcctgcgggcacggccgtcgcccgcccgcagcgaggagagcctggagtgggagaaaaccaccaacagcagcgagcccgagtag

SEQ ID NO: 132 - protein, 950 aa, Homo sapiens
MPRVSAPLVLLPAWLVMVACSPHSLRIAAILDDPMECSRGERLSITLAKNRINRAPERLGKAKVEVDIFELLRDSEYETAETMCQILPKGVVAVLGPSSSPASSSIISNICGEKEVPHFKVAPEEFVKFQFQRFTTLNLHPSNTDISVAVAGILNFFNCTTACLICAKAECLLNLEKLLRQFLISKDTLSVRMLDDTRDPTPLLKEIRDDKTATIIIHANASMSHTILLKAAELGMVSAYYTYIFTNLEFSLQRMDSLVDDRVNILGFSIFNQSHAFFQEFAQSLNQSWQENCDHVPFTGPALSSALLFDAVYAVVTAVQELNRSQEIGVKPLSCGSAQIWQHGTSLMNYLRMVELEGLTGHIEFNSKGQRSNYALKILQFTRNGFRQIGQWHVAEGLSMDSHLYNISDTLFNTTLVVTTINPYLMLKGNHQEMEGNDRYEGFCVDMLKELAEILRFNYKIRLVGDGVYGVPEANGTWTGMVGELIARKADLAVAGLTITAEREKVIDFSKPFMTLGISILYRVHMGRKPGYFSFLDPFSPGVWLFMLLAYLAVSCVLFLVARLTPYEWYSPHPCAQGRCNLLVNQYSLGNSLWFPVGGFMQQGSTIAPRALSTRCVSGVWWAFTLIIISSYTANLAAFLTVQRMDVPIESVDDLADQTAIEYGTIHGGSSMTFFQNSRYQTYQRMWNYMYSKQPSVFVKSTEEGIARVLNSNYAFLLESTMNEYYRQRNCNLTQIGGLLDTKGYGIGMPVGSVFRDEFDLAILQLQENNRLEILKRKWWEGGKCPKEEDHRAKGLGMENIGGIFVVLICGLIVAIFMAMLEFLWTLRHSEATEVSVCQEMVTELRSIILCQDSIHPRRRRAAVPPPRPPIPEERRPRGTATLSNGKLCGAGEPDQLAQRLAQEAALVRCTHIRVCPECRRFQGLRARPSPARSEESLEWEKTTNSSEPE

SEQ ID NO: 133 - DNA, 3049 bp, Homo sapiens
ggcgtggtagcatgtgcctgtaatcccagtgctttgggacaccgaggcaggaggatcactcgagcccaggagtgcgaggctgcagtgacgctagacttcaggaagaccccccatttctgctccactcctgggcttggagaagagtacagctgctcttgactggtgggaccttttgctggctaggggtgatgggagaagcaagagagggatccacacacctgcgcttagctttctatgacctgggcggatggaggccaaagctgctatcttggacgaccccatggagtgcagcagaggggagcggctctccatcaccctggccaagaaccgcatcaaccgcgctcctgagaggctgggcaaggccaaggtcgaagtggacatctttgagcttctcagagacagcgagtacgagactgcagaaaccatgtgtcagatcctccccaagggggtggtcgctgtcctcggaccatcgtccagcccagcctccagctccatcatcagcaacatctgtggagagaaggaggtccctcacttcaaagtggccccagaggagttcgtcaagttccagttccagagattcacaaccctgaacctccaccccagcaacactgacatcagcgtggctgtagctgggatcctgaacttcttcaactgcaccaccgcctgcctcatctgtgccaaagcagaatgccttttaaacctagagaagctgctccggcaattccttatctccaaggacacgctgtccgtccgcatgctggatgacacccgggaccccaccccgctcctcaaggagatccgggacgacaagaccgccaccatcatcatccacgccaacgcctccatgtcccacaccatcctcctgaaggcagccgaacttgggatggtgtcagcctattacacatacatcttcactaatctggagttctcactccagagaatggacagccttgtggatgatcgtgtcaacatcctgggattttccattttcaaccaatcccatgctttcttccaagagtttgcccagagcctcaaccagtcctggcaggagaactgtgaccatgtgcccttcactgggcctgcgctctcctcggccctgctgtttgatgctgtctatgctgtggtgactgcggtgcaggaactgaaccggagccaagagatcggcgtgaagcccttgtcctgcggctcggcccagatctggcagcacggcaccagcctcatgaactacctgcgcatggtagaattggaaggtcttaccggccacattgaattcaacagcaaaggccagaggtccaactacgctttgaaaatcttacagttcacaaggaatggttttcggcagatcggccagtggcacgtggcagagggcctcagcatggacagccacctctatgcctccaacatctcggacactctcttcaacaccaccctggtcgtcaccaccatcctggaaaacccatatttaatgctgaaggggaaccaccaggagatggaaggcaatgaccgctacgagggcttctgtgtggacatgctcaaggagctggcagagatcctccgattcaactacaagatccgcctggttggggatggcgtgtacggcgttcccgaggccaacggcacctggacgggaatggtcggggagctgatcgctaggaaagcagatctggctgtggcaggcctcaccattacagctgaacgggagaaggtgattgatttctctaagccattcatgactctgggaattagcattctttaccgcgttcatatgggacgcaaacccggctatttctccttcctggacccattttctccgggcgtctggctcttcatgcttctagcctatctggccgtcagctgtgtcctcttcctggtggctcggttgacgccctacgagtggtacagcccacacccatgtgcccagggccggtgcaacctcctggtgaaccagtactccctgggcaacagcctctggtttccggtcggggggttcatgcagcaaggctccaccatcgcccctcgcgccttatccacccgctgtgtcagtggcgtctggtgggcattcacgctgatcatcatctcatcctacacggccaacctggcagccttcctgaccgtgcagcgcatggatgtgcccattgagtcagtggatgacctggctgaccagaccgccattgaatatggcacaattcacggaggctccagcatgaccttcttccaaaattcccgctaccagacctaccaacgcatgtggaattacatgtattccaagcagcccagcgtgttcgtgaagagcacagaggagggaatcgccagggtgttgaattccaactacgccttcctcctggaatccaccatgaacgagtactatcggcagcgaaactgcaacctcactcagattgggggcctgctggacaccaagggctatgggattggcatgccagtcggctcggttttccgggacgagtttgatctggccattctccagctgcaggagaacaaccgcctggagatcctgaagcgcaaatggtgggaaggagggaagtgccccaaggaggaagatcacagagctaaaggcctgggaatggagaatattggtggaatctttgtggttcttatttgtggcttaatcgtggccatttttatggctatgttggagtttttatggactctcagacactcagaagcaactgaggtgtccgtctgccaggagatggtgaccgagctgcgcagcattatcctgtgtcaggacagtatccacccccgccggcggcgcgccgcagtcccgccgccccggccccccatccccgaggagcgccgaccgcggggcacggcgacgctcagcaacgggaagctgtgcggggcaggggagcccgaccagctcgcgcagagactggcgcaggaggccgccctggtggcccgcggctgcacgcacatccgcgtctgccccgagtgccgccgcttccagggcctgcgggcacggccgtcgcccgcccgcagcgaggagagcctggagtgggagaaaaccaccaacagcagcgagcccgagtag

SEQ ID NO: 134 - protein, 927 aa, Homo sapiens
MEAKAAILDDPMECSRGERLSITLAKNRINRAPERLGKAKVEVDIFELLRDSEYETAETMCQILPKGVVAVLGPSSSPASSSIISNICGEKEVPHFKVAPEEFVKFQFQRFTTLNLHPSNTDISVAVAGILNFFNCTTACLICAKAECLLNLEKLLRQFLISKDTLSVRMLDDTRDPTPLLKEIRDDKTATIIIHANASMSHTILLKAAELGMVSAYYTYIFTNLEFSLQRMDSLVDDRVNILGFSIFNQSHAFFQEFAQSLNQSWQENCDHVPFTGPALSSALLFDAVYAVVTAVQELNRSQEIGVKPLSCGSAQIWQHGTSLMNYLRMVELEGLTGHIEFNSKGQRSNYALKILQFTRNGFRQIGQWHVAEGLSMDSHLYNISDTLFNTTLVVTTINPYLMLKGNHQEMEGNDRYEGFCVDMLKELAEILRFNYKIRLVGDGVYGVPEANGTWTGMVGELIARKADLAVAGLTITAEREKVIDFSKPFMTLGISILYRVHMGRKPGYFSFLDPFSPGVWLFMLLAYLAVSCVLFLVARLTPYEWYSPHPCAQGRCNLLVNQYSLGNSLWFPVGGFMQQGSTIAPRALSTRCVSGVWWAFTLIIISSYTANLAAFLTVQRMDVPIESVDDLADQTAIEYGTIHGGSSMTFFQNSRYQTYQRMWNYMYSKQPSVFVKSTEEGIARVLNSNYAFLLESTMNEYYRQRNCNLTQIGGLLDTKGYGIGMPVGSVFRDEFDLAILQLQENNRLEILKRKWWEGGKCPKEEDHRAKGLGMENIGGIFVVLICGLIVAIFMAMLEFLWTLRHSEATEVSVCQEMVTELRSIILCQDSIHPRRRRAAVPPPRPPIPEERRPRGTATLSNGKLCGAGEPDQLAQRLAQEAALVRCTHIRVCPECRRFQGLRARPSPARSEESLEWEKTTNSSEPE

SEQ ID NO: 135 - DNA, 51323 bp, Mus musculus
tctgggagatgaactacctcatcttccataggctctgaccactatgatcccagaaacacaaagtcaagccaccgtgaactgaactccctagaacagtggctctcaaccttcctaacactgtgaccctttaatacacttcctcatgtggtgatgacccccaaccataaaattactttgctaaggttatgaatcatagtggaacacggcccacaggttgagaagtgatgctttagaatggtgagcgaaaataaatcattcctccttccttcagtttgttctctcgggtattgtgatcactgtgttgagaaatatagctaatatccccaccctctccaccatggaatgacagcaaaagtctttcaccaaacaccaacccttagggagtagaatcctcagcttccagatggcaatcacctcctgttctttataaaatgagccagcctccggtgttctgttgcagtagcacacagtggacaatgataatcactagctgcatgttcgagctgaataactgttcttcccacttcacattctctcctccacaaaacctctccctgtcctgcgcaccgagcacacctccaccccttcagcacaggatcaagaaatggagaatcctggtacagactgtctgagaccaatggcataaactggaaagggtgtgctggtcagtcttgattgccaatgtgactggaccgagagaggcttagattactacagtaaagcccacgctgggcgagtctgtgagatctgcagaaacaattggcatggcaactgagggaggaaaaaaaaactctctctgaaggtggctgacactactcagaaggttggaacctggatagagaagtaggggaatggagaagagagccagccagcatatgcaggcctcatgcttcctcaacacacggagactgcctgcatctgtgggccagccttctgcacccttttaatgtgtgcttgccttcacaagttctcaggagggcttccagagcttcattgggggtccttcattatgggttctccagttctgagcaactgctggcttctgtggctttcgtggctctccagcaggcacacagctgttgctagattggtcagcccttttataatatacttgacatatgaaactgttggctctacagtaatgactgaatatgcacttagaagggcggtacgtcgcttctctcctctttctttccctatgcgtggctagggaaagattagcccctccccaagatggcgtcttcacacaaaagcaaaacccaacacctttacctcatgaaatctccatggcttcaggattccatgttctaatctgcctctgaaggccaagagaaagagccagagcagccccctgtcccccagcctgagaccaccaagccccagcagatggactcaagagtttctctgagtagtcttaaaaccaaaagctgcactcctgcacacacatgtacacacagacaaggcgcccccttggtgcacttgaggtagaagttacactgaataaactaaacaggatttgacagataagtttgctgtgataaaaataaccaaggtaaagatgggaaccctggtccacacagagcacaggctgcccaggattcagatggtctgtgtctacagtcatggcggaaggagaagactgcagtgaccctaaaggaaacaaggagacactggctctgccttttacttcccagaactacgagctcagagtgtcacagctgaatgatttaagccaacaagaaaatgctgactcttaattctggaggccagatgtgtggcatccagtgtgccgggctgcactttccaggctgtccaggaaaggacctgccttcatccattctgtgctgctgcaaccaggcataccagtccacagagggtggagacaaagcatcaacacagtcccacattaccagtggtaattcattcataagctctcatgggctgatcatttcttaaaagccctgcctccatcgctgtaaccaaatacccgccacacccaaactacagaagagaaaggtttgttccagttcacgatctcaggaacgtccatgagtgcttgctgggccctgctgctttgaggcctggaatggagcagcatgacagtgtgggtgtgtcacaccatggtggctgcatggggaccaggaagtaatgaaggagaaaagagaagggattaggggcccaatatccccttcaaaggtatgctccattggataagaagacttccaattgagccacatctcttacaggctctgcttccccctgacagtgctacccagctgatgcactgggataacactgggaagtccttatataaacatggggttcatagttctgtatgtcaggtagtcctcaagtcctgacaggatcaggtaaaggcctccagaaggacatctgaatacagtggaagagcaagtaagccatccgggagagacgcagagggtggagacaaagcaccaactccgtcccacattaccaatggtaattcattcagaagctatcatgggctgatcatctcttcaaagccctgcctccacatctgttctaacatgtgagctctgcggggtaccttgaaacataggaggatcttttctcgactctcccagctgctggaagccacagaggctcccaggcttgtggcagggtcatagctaagtctgcctctgccttcacacggtcatcttccctgcctgccttcatataccactccccgccatgtctgtctgtgtcccttgttctctgctgggaagccagtcccgctggacagcagctccatcctacttcagcctgacgtcatctcaactcatcatctctgcactgactattcagagggtctgcatacacatggactcttagcagacacttctcaactgacttcaggcacccactaccccagagaaggatgccccaagctgccaagaaacgatagagtaaaaggggccatttccagctctggaaccatagacaagtgacttgatttctctgagcctttattatctcactgacatttgggggttgcttagaaagttgaagttgagacagtgtttatagctgtaaagcaataaggtgcttctttacctataggtaacttcttccctctgtgatgtccgacagagcatcaatgcctttaccacatcttcccaaccctgtggcatctgcagggctgttctccacaggagcgtgttggctccctagatgacttagggagctgatgcactcagaagacatttccaaagtccctctgtagaagatcagagaatgaccatcttatggctgagatttgctgatgtcctaagggaccaggccagaaagagcccagtgtgttttcctgttagtccttcctcacctggacttggctcaggctcctgcatgtgccccagtttctctcgggagcataggatcgggccaagcaaagctcacacccaggtttaagggcagagggagcacatatggtgtgctgactatgtgagaggccacagctgcagctggaagtaactccacagagacaagggcaatgaggctcaccagattcttcctagtcacaaataggttggaagccagctcctttctgtcagtgggtagcactctctcctcccatcttccttcctggaggaatgctacatcatataatctcacagcaggttgagctgtgcagctgcctaaacacccaggtaactgaaggaaaaaaaaaaaaaaaagccgcaccctgcccttacccacatagctcacagaaggggctggcacttgggtaaaaacacatgaccatcaaagcaacaaagaatcagcggtgcctaaggaatagatgacaatggtatgtgtaaccggaagtccattttgatgggaatgagtcatttaatgctcattttcatcttactgtctgtgttgaatgtttcctaggtactctgtaagcatttgatcacatcagtcccggtaggcaggacctattactgtcctgttacagaggaggaaggagaggtacagagagactaagtagcttgcccaaggtgcggtagcccgcagacaatggagccgcgatgatacagatttaagctgtgcatgaagattattccatgtgtgtgctgtatacatagctgggtcgtgagaaaatgagaaaagcggcagaagaagatgagatcacttacttactaaccagattttaaaaaaaaaaaaaaggcccaatctcagagtcctccctatctgcagtctcaaatccacaacatggtagaagaaacagaatctggggctggtaaggcggctcaatcagcaaagcacatgaacaagcatgaggacatgagttcaatccccagaacccacataaagcaaggcacgcagtgctcgcctgtaatcccagtactggggcaggagggccaggaagagctctacagctccctatctagccagcctagctgagtcactgagctccacgttcaatgagaacccctatctcaaataactgcctataggcgcagcactccaaaggctgaggcaggaggattacaagtttgagggctgcccttggttatatagtgtattagaaagggtttttattactccaattattatgtcatgaccaaatagcaagttgggaaggaaggtgtttatttggtccatcaccagaggaagtcgggacaggaactcaagccggaatggaacctggagctgatgcagaggccatggaggggtgctccatactggcctgatccccctggtttgctcaggctaccttctatagcacccaggagcaccagcccagggatggcgccacccacaataggctgggccctcctccatcaatcaccaattgagaaaatgccttccggctagatctcacagaggcatttcctcaactgaggctccttcctctctgatgactctaacttgtgtcaagttgatacaaaattcagctagcacatatgctgagtttgaagctactctgagctacatagattctgtctctatgaaaaagaaaaaagaaaggaagaaagtgtcttcctggatagtttcatgtcaacttgacacaaacaaaagtcatctgagaagagggaacctcaattgagaaaacgcctccataagacctgggtgtaggcaagcctgtagggctttttcttaattagtgattgatggaggagggcgtggctcattgtgggtggggctgtccccgtgctggtggtcctgggttctataagaaagcaggctgagcaagccagggacagcaagtcagtaaacagtacccctcctgcctccaggtttctgtcctgtttgagatcctactctcacttccttcagtgactaacggtgttatttgagccaaataacccctttccttcccaacttactattctgtcacagcgattgaaaccagaactaagttagaaagtgtctcaaaaggtgtgtgtgagagagagagagagagtgagagagagagagaaattggactcagacacaatcttgttcttggccaagttaaggggaagatgccaggctaatggaaagatcgctcactgagccttccaccaagttacaagacgcaacagcaacgtctcccctgagacacagctgttctggtgctccaggggtctgagaggcttatcagaggttccagaagagctgcagcagccaccctagaccctctccgtggactgtatatggtggagtcaaaagtcctgagcttcctgatccacacaacgtgggttccaactccatctaagctccagcttgctcttttgtaagagacggcagtaccatcctcatgatggagtgaattaatgtgacactgtacagaagcctaaggacatcgctcagaggagcacatgaggcactgaccaaattttactctctgtagcttatttgaaagcaactgtgtcccctgtcatactgtcaggcccctacatgtcttcaccctccttgaggccttggtaagtgttaactgaattggctgctccatcagcaggagccacaagagaaatgtcagctcctcaccaacagaggtgactaaagaatctttgggggcacactgaggttcccatgtctctagataaatgacagttctcgtagaaaggcagagacttgatggagagcctcactttcacgccctttccatgatgcagttcctcctgctatcccataggatggttgagcgctcactcctttcacggggcactgcactgccaacggtgtgaaagtcatggatactgctggctcctgcccacccactgcacccttctttatctcatgtcttgaataaagtcagacaaacagatctgttattgaacttgaattgcttgggttcagagggcggatcaaagggatttgcctttactaagttctaactctgaacagtgtctttctgctcctaagacagtggtagcagcagcagcagcagcagcagagtggtgagctctcaggggcaggtaactccttacccagagagcttaaaaggaggattcaggttgagtaggtggagggatgggggcactgaaagtctacatttctgtcaaactctcatgaactttggtcatgtcttaagcagagagcccagcgggcttgcttttacagggtgcttgaaggtggaagtgcagggtgtgggctgactaagctctctgagagagatcatttctgttttctccaactgtagtgtctaaccacactgataacaccataggaaacatcccttgggtgggtgggtgggtgggtgagtatggttggatggaaaggtgactgctgatattaagatcaaatgtacagtcggaaacacttatccagtaagatgtagttctatgaactgggggtagaacaaaggtgtgggaggggggagggggagaccgctgcagctgaggatggtaagagcagcagatcgtggaagctgagaaagagtctcctaagccccaaggcattctcgttgtgtctggaatgcctttctaaacttagcatgatttatgagtgtatcccatcacctccaacagaccaaggcaggtgctcttaggccccacttttctctcctaaccctgcactaggagacttttctcagcctccacaatctctgcttctcttcccatcctttcctgtagctctctacccccagtttatagaactacatcttactggataattgtttccgactgtgcacagaagagctgtatccacaagaatagggataatatctccactcaccgagtctctttcaggtagcagatacatgacctagatcatctcctttaactttcataactaccttgtgaagccatccctgcctgacccctgtgtagtgaggaagatggaactcaggaaataaataaagtgtaacagtcaaatagcaattaatattagggcatggggactccgggctaccaaaggtcatgctcttgacctaagatgatacaggataggtgaagcctgaagcatatatcatacatacatatatatacacatatatacatatatatcatgcacacatacacatatacctacatacacttacacatatacacacactcacgtatacatatatacacatacacacacatataaatatatatacacacattatacacatacatatatacacatgcatatatggatacatgcatacgtgcatatatgtacacataagttacttttattgttatttttctttcttctttgagatagtctctcactgtgtagctcagcctgtactggaatttgctctttggaccaggctggcctcaaagtcaaagaaatctgcctacctctgccacccaagtactgggattaaagatgtaagccaccatatctggcttgtttttactctgtgtgggagggaggggtggcctcgatgtgactaggggcccgtgatggccagaagcacagatgtctgtgcgctgcccaacataggtgctaggaactgaactcagatcctctgaaaaattcgtttggatttgcaaacaagccatctcttcagctcctgaagcctatatatattgaagagatgtgtgtgtgtgtgtgtgtgtgtgtgtgtgtgtgtgtgtgtctacataaattataaaacccaaatggcaatgtgaatatactactggaaccctgtagatggccttgggaggggtcatacaagtgaggggaacaaaagccccagggtcacagtgactctgaagctgacacacttggggagaggagcaaggagagaaagggaaacctgctgcaagggagagggaaggagaagcaggaagtcagcggtgagcgagcaaggaggaggggaaagccagcaggaaatctaaaggcagagggaggctctggggtgggctttggttgatagaatgttttcctagcatttacaaggctgcaggttctatccccagcactgcatacataaaccaaaagttatgaggcatatcttattctcaggactcagtaggtagaggcaaggtgatctgatgttctcgtcattctgggctaaagcagtgaattagaggccagcctgggctacaggagaccctgtaccctctacccatacccatactcatactatcccctaaaaaggctgaggcctcccgttgaagaaggagttatggcttagctgttcacaccgggcacctgggagaggcaggcctgtttcctacaggccacagggcctccgtctctcagctgttatgttcctcccctgagtatcacagcagcttattcagtcccgcctgactgcctccttcccaggcccatgcaatgccttcccagaatcatctgggaacttgagccaaagcctgagccaggagtgctgagcaatcaccctgctgccagccctgccctgcagcagtccctcctggctcacctgagcactgggtgaggaaagaaaacatataggccagatgtttatcctggcacagactggaacccaacaaggaaggcctggccacaggtgacccaccgctgaaattcttctttaagaagccgtgctatggccgcaaacttcctgctctaaaggtctctgtctggggtgaggaagtttgagagcctcgtggactcagaaggccctgaagaccctataggtttggcctcagatggaacctaggctactcaacatagaccatagcaaccatatccccagtgttctgatgcctctgtagggtcaggatggcagcccatcctgactggcagtgggagaggactcaggttccaaccaccactgttcttctgttagaaacttctttaccatccccaaaggtcgaatagaacaaaattgtctccatgaggttatcatgagagttaacgagatggcgcacagaagcacattgctaaatggaagagctaaggcatacatcttactgttctcccaggagaaccagatgtgaaacagaacacaatgtacattttttttaatgtgtatgtgacgggaggttttgccccagggactctgtaaatgtccaggtcccttttagctgtacagtctgatcccaaagttccacttcatacagcccctggcctggggtggttccaactatcctatgtggcaagacatggatcaaaaatgagcctgtgaagaagaggacctagccctagttgtagtacactggtgactttccagcagtacgctatttgaaaggcacattgcctgccaggtaggttaggttgctcattcgatccaacactcactctgagtcttgggaagggaagaacacacatgttctttagggatgagatccacatggacaccccaatcctaatgcctgacacaagctagtaatctaccgtgccaacttcctgcaacccacaaaaaagcaccgccatggtgagaagtcacacaaccagaggaaagagaaagagaaagagttgtctgccgtcacctagcctcagccaatgcccgccctcctgccttcctggttggatgaaaggcattcaagcagataggcttgtgtaactctttaggtgtgtcacctgtccttaggcctatgaaccactccaggtgttgtccctgcccctaacgactgggtgtcagattacaagacacataatcattccagtttggcaacttcaccggttgtgttataggacttgaccagccccaatagtcctcaagtcactcctagatacagtggcaggtggtagctggcttgcggaaggaagaggaagaagagaatgtgggccatcaaggagcaaggccagccttgcacttgggccccctctgctcagtgctgaccagggctttctgagccgcttcctaatgaggctcatttgaagaccccccccacccccctcctgctgtcttgggtggcagagctagctccaggctgtaagaaaattaggaggattaccaaagcagtatggtaagtacaggggccctcagggtggggagggcagctgtccacaaagggttgttcaaggaacctgtggggtcattaactgagaatgttataacaccttccaggcttaataaaaaagaggtcacaattgagtcacctccacgtccagcctctcatacccatcagggctcctctgcctccatcattgaaggtgggcgtagatagaagtcagggctgtctttgtccaccaatcgcctcaaagtcatgcttgttcctttgcatactgtctcgtgtgtgtgtgtgtgtgtgtgtgtgtgtgtgtgtgtgtgtgtgtgcgcgcgctcgccctggaggatgtcatggtttcatcaaaggcaagggctactttggtgtcacagtgaccctcagacactccctgagaaaagtcactcctaccctttataaagaaaacagtatagatatgccccccaaaacaatcaggggtgtctgtggggctcttctgtttgatctctttaatgctcatctccattgactatctttagcatcttctgctgctggcttgtcctctcaagggggacagctgagaaccaggaaggggaagagataatcgccaggcctaaagtgggagccagtgggtcttgattccccaatcctcagcagtcgctcaggcagtaaaacagaaaggttgaagaaaggacctgcctcccccatgacaaaagggggtaggtgctacctaacgcttccagtgacccactagtaaaaaagtcttgcaaaatgctagtgtctggtaagggcagaacaccaggaactgccttgtcagtactagaccagggctgggactgaagcactaactacctactactccatcagagggggtcctgtgcagaggtgcccccactggggtcagtgaggaaggaagggagcagtgcccacctccagactgtgagccactgctttgtagcactgaggaaccctgggttgccccctcttggatgagccactggccagggtgccatttctaaggcagctgacaggagcaaaagctgatgtggaactcaataccaggatgccagctctctgcaaggtcttgagactttaatttcactgagattcaacacatcctctacccctgtagaagggaaacagcgtggttcccaaaacccctggcacatacacaggatgcttagaaaggctgagcaaagcaacgtgtgtgaacagactctgtaaagcaggaagcccgagcaaatgagaggctgtaggtaataaggaacccattccaggaagtgagagccagaaccatgtctcaccctgccctgctgccaccacggaatgaaagttgggtgttgctgatgagggaggaggtagatggtcagcatgggtgaagggtcaggccacaaggtcacagagcaatggccgctagactgcagaatagaactgccaaactctggccctgagcaaaccactaagctacctgtgtgtggcaaccagtcctttcccattgatgaggccagaatgagcctagctctcggcccacaagagaggacggggtaacacaggccaggctcagccctccctgctctttccctctatcctcctgcctctccctgcaagagctggtcaaagtccagctgccagttaacaacggttttccttgtgtttactctgccagttatgtccagggagagccacagcaggccaccagtcctgtgccgagtgagagtctagtgtctgacctgccacatgtcctctgcatctgagaccaaagggggaagttggggacccctgactagccaacctgggcacgattcattactactctgtaagtcctaagcacactaggctccaaagaagaggatgttattatccaaacaaggcagggccattattaacacccaaagtcagtctcaacccttcaaggtattccccattgctttcctattcttgcctctactgccccaaagtattttgtgggcttgactggaggactgtggccaatgaataggccagaccctctggcaacaggggtctaatagtggactttccactcagattgaataacagacttcaggagctctggtgatgtcatccttggctttggggtggcatatttagagttgggcagtagatagagctgggtgatgctctctcttcatacctgcttccccacgggaagagaacctgatgtcactgcggctccagggagccagctgcataatcagccctggccaacaaccaactgtttggcaaggggtggaggtgttgagaaatatctagatgcttgcctccttagaggagctcaccagagagggatcacaaggtacccctgagccaaaatctctccagagtggctggaagctaaccccagaggagaaagtgcttgctttggacttcttgaagaatgagccagctctctccaggcagggaagccaggaagggtatgtgtcgacatagagggaatttcacaagacaagcaagacagatggtagtgcggggacaagagacagcacactatggtgggagcaaactgtgtagggagcagagaggtcacgatgcatgcactatgatcccttcatcagagaactccgcctcagggtctccccctgagctcagagaggcaaggctggagaagggtcccatcaaccgagaggttgcctccaaaggaccatgtttcccaccaggcaaagaccagctctgaccactccttgtacagtgcagccagcctcatcatcaccagaccctaggaaagcattgggaggtgaggacaagcacaaagtcatcactgtggagcgtaattcattgtggggatgctgtgaggcaaggtagggggccaagagtaccagccttctggtgtcaggagctgcaggatgggggaggggcgatagtataaggagagatgggaaaaatcagaccccacagagggctccagaactctggaccaacttcccaaagtccaagcacagctggaggcacacatccttggacctgcgaatccccggaggcctcagatttcccaataacctcttctgttcagccttccatcttgcccagatgcaaacatcagcctcaatataacatgtcaacatcccagtgacaccctaagtgacagtggacttcctatgcctgaaatgtacttaaactcaccaccaccagactgtgagcttcccacagccaaggcccatctttcatcttcttaactttagacatcatggaccggggatggaatagtgcccaggtgtgtgagtaagtgactgagagagcagtcagtcagtgggtcggtgactgtctgcctgttggtcagtcagtgtccctgtaaatggggagtgaatgactgactgataaatgatccaaaaccgaatcccttgtagccggattctactctaggtgatacagaaagcaaggttcaccacatccaacctgaaaaagtacctaatcctaccagaaataaaagtatatttgaccctaaaaacagaagctggggatgagggaaggacaggtctgagcctgttggaagccccagcaacaggactggggagagtcaagcaagcagagacagtgtggcaatccccctgtgatgtatttaactgcaccacccagcatgccactccaattaaacactagatcgcagcagagaaacagaattcaaagctgcaacgccctctcctcctgtctgctcaggagtgcttcccacttctgggtctttctgcaaatggaaattcacaggtggcaggtgaaagaccactttgtggaggaagcaggtgacagaatgaggtggtctgtccaggggtgtggaggggtctttggtcctgaagtacgctgcacacctgcctgggctttgccctctggtgggacagagatgcccatgcttggcaaactggctgtggtgtcaacatcttccactactgtctgcctatactatgtctccactgctcatagagtgggtacctaagtgtctaccatagactgggttctaaaaagaccctggaaggttaggagaagatttaagatctagagacacacactcctgggttccaagactgcacagaaggagcaagctaaaatgctcaccttattctggcagaacatggccctccttcacccacagatgccaccaagaagaggacaaccatagcactttcaccaagggaataaatggggaacctttatcctattgtcacctaggcaccagagacatccccactggcctatcctgggcacttggagcccctgatgtcttatagagtcatggcaacagacatctcatcctaacctgatgccagaagtgcagcctccgtggctcaagcatctccctctgagtagaacaccatcgctctgagacttggaagttaggagatagaggcatggagacatccaatgccttgaaaaggtcacttgcttctaggaggcagagataagactccaaactcatcaggtttacagacctatggaaccagcacacggtattccctgagccactgtggaattgggacaccccatggcactacctccatgctaatggaatttacagcaaagtgtgcatgaagtgaagatactaacacaagggggttgggggaaggaagggcttgggtttttgcagagacttcagcccttcctaagatgccaaagattggaggaggggagagcagcacaagccactggcattgtcacgaaccttcagggaggctgagacaaagtttcacagccagtcttctcagggaaaaaattatccatattgccatgtgaccattaaagagagaaaactgatgtaaagccaagccaggtatagtggctcacacctgtaatctgagcatcctggaagctgaggcagaaggactgccatgaatatgagaccagcttaggctaccaacaagttccgagagggaacaatgagtgagtcaggcctcagaccagtctcacctgacaagagatggtgcaagccacaagccagaagtcagccagcagccagcagttcccagtcacagactcctgggaaaggacctatgaggccttatgtgttctggccttgcagccctcactggaacccaatttagaattccataagcaaaacagaaatcccacagtggcagcacttggaaggactgtagcctcacccgctcttgcccccacctaaccaccccagcactgctggagctctgcctagtaaccaaagacgctagaggccctgcatctggacctgcctctgtctgcttgagaaactcctgcgtggtggaccagctcctactcaccccacccccctttccaggaagtgcttctagcttcagcaatcctccctctaacaagagagctcccgcaatccccctactgtctgagaatcctcttgggcctcttctttcagatggtttgaatggccaagtgtgcttatccttctgtctggctttgcttctctgacctgcatctgctacctagccatcaaaatagctgtccagcatccttcacatccatgccagatgctctgtgaaacttacccgttaagtatctactctgtcaggtacttgccaggtattcaaacattgttagtaattattaagaacagtagcaggctgtctgctcatgggcataagaattctgactcttgtgtgtaactgggtctccagcccccaaacagtgcttttctgactgaataaaataattttattacagttcttgcactttgctccaggccatgtgctggagaccatgcatatttggagctcattaggaggaagacttactaaaaaccaatctctgtctctctctgtgtctctctttgtctctgtcttctctcattgtctctctctgtctctgtctctcagtgtctctctctttctctttcattcacacatgaaattgaggctcttgatggtcaaataatttgagtacagaggtgggattcagacctcaatggcaggatgccatagtccgtgctccatcccctgtcaagatgcctcttctaacagtagcatcccagcaagaggaaactttccaagcacttgcagagttatatgagtgggcaggaaagtgggagaagaacactaggttatgcaaccacaaggtaataatgcagagaagtcccggaagcgccaccagaatgctatttataggctctgaagttcagagttcccaggaaagccatcagagagtcactgagtcttttgcgggcagatcagcagcagcagccaaaggagccaccagaggctggctatccctgagacacctggaacaaagcaggctgctcccttctgcccttgcagggaaccttgccggtgtacttgaactctatttgacatgactgaagtccagccagcacgtcttctcaggaagaatggatacagtgggccccaccccaaccagagcagctgagaccctttagaccacaaaaatcaaccaagggggccataaacagcaatgggatcctgagaggaccagctgaggtctttgagggcttggaagggtgctcgtagcaggtggagtgtttgtgctgattcaaacccacattgcaaagtgggaaggaagctagggtcaggagacacagaattgcccaggattgcttagcagctcagctggggagccaggccctctctataaaatcccctcttcccttataccacttcctatatcttaatgtttaaagacaattcaggacaaacaaaggaagttgagttttgttgttgttgttttgttttgttttgttttaagacagcatcaactctgtggaattctcttataaacatcagactgcattgtgggtggcagctacctggtttgggtaaacgttatttagagaacttatctaagctctagcatccatgagccctcccaacaagcaggtgcccaagaatccatggaaggctggaagtctaacctgtgcagcctcataaacacacacacacacacacacacacacacacacacacacaaatgcatgcacacacacacacactaccattgggtctcttcgggaagctaccttttcatctgaccgttctggaaagagaaagtgggcacaggttgttagggcagggggtggggtgggggagctgagcaaaatagaacaaccaagaattcagaaatagaggggcggggactgccttccctgggtttgttggctgtgcaagagtgagctcacaacagagccacctggaacaaaaggcctcaggaggaagccaggtgtctacagtcagctcctccgaagacattggcccacagtgtagctagagggcagagatcttgcaaaccctgtaccacacctccatcatgaaacagggattcttgcctctctaccctggtcttccctctccaggctctacccgaagttaagggcctggcagaaacacaaaggttgattcttaaataacagaactgaacagcaggctcagtagctggattaacagtgggttatctgactcctctctcccgcccccaggccttgccctggagctattataccttggaatgggtaggattctctactctaattgccaacaggtcagcacttatgtggtttattacaaggcacggtggtttctaatgtagcagctgggctgaggttaggttaaaagaaagcctacacctggtaaagactgcttctcctatgtgtgaagctggtacctagcctattttgctggacagacatcctgaaaacggagtcacagggcgggactacttggaagccaacatggctgttgccactgacacctttgattgcaccttaaaatgctgcaccactgcagctcccccacccccgccatgatgaagcaccccgccatgatgaagcacccctccataaccccttcctgtcgccttacctgccattgtggaggcaccaagagacaaggtcttgttcccagcctgataaaggcatcaaactgcctgcatagccacaggtggccagatgcctgctggcggtggtaggactgatagttaggtgtaggttcagggggtcagagtggcttaaggctacctagagcaaccccctgaacaccagagctagctgtggccaagcctagctcttcccactaactgtgagtagccccaggtctcttggctcactcagagagcagtccccacccttcccaggggtgcccatgtcaccctgtcactggcctcagcaacctaactcaataagctaagagcctcagagggtctgtgtacccatcacctggcaacagccgcatctttagctccaaggtttccctctgagatcaagggaagccagggcccttcccatgggatcccaaagctgccacagagaggaacaaagccagagaaacagcctctcggtgctctagtttgtcttcctcgtccccactctgttcttccagctctcccgctaacctcttcccagagcaaagcaatgtctgcttcggagaagcaggcagctcagcagggcgaaggagctggtgggctctgtgccttgggcctcttcattattcactagtggaacactaacactggtctttccactgtggactgatcaagttctttaccatctccgaaagacagttcccagtggcttggtgggggacccagtagtcatagaagttgagaggagtgatccagctggacagcaagtcacaagtcacacccccttagttgtctctctgtggctttttctgtagaatttaaaaacaaaagctgcctggtcagctgtctagggtcatctgtctctgaagtagaagctaaaaggaaccatttaatatttgggactcggctaagcccaggaacttctccaggatataaaacattgagggagggtgagaggagccacagctgagaagggcaaacatggtagaagatggaagcctcgatggtaacattaagaggggcactcccagacaccaaagtctgatgcctatagcagctgccatcaccatttgtggatgcgttggcaaagccaggaagctcgtccaggtctctgtgggaagagctgtggcgctcctgagggagcctcctgtgtgttgattgcaggcaaagcataagcaacaagagcacattgcaggagggtagagactcaaaaggatgtactatctcctaaggatgcttaaacatgcaggtccttgaaactgctgagaaatgcaagcagacctcagatccagaagcccaaactggagagctgggtctgccctttacttgctctgaaaccacagaagccactttgtggatagacttcggctttcaattctataaagcatgaatgccttgggatttcctagagattaaatatagtagcaccttcgaaaggaagatgttgcacttgataaaacaatattcagccttcataggtggatactggattaatctgttctcttgatagtgaccgactggaaaacagagcaggaagatgctctgaactaaccaggtactaacaagtacttgtcaacaagcatccacttgttctaccgttctaccaacatcctgctcccaccaccactaccactgggcactaagggtcaggaattctcaaccttccattctactccagccagcaaaagctgtgttccagatgagccctaagctggacatgggctgaatcagacccacaggtcagggctctgtacagtgtgagtcaacagagcgcatggcctgcctggcccagccagcagctctgacagaagtgtgaagactggagccttcacttgggctatacaaggactggaccatagtaactatgaccagctcaagagattaaactcaagttgaggataatcaaagatatacctagcagtgaagagggaatcacaattggtctttggttgctttgcaaagttccctcttctactgactctaggatagtatctttcctctgtctggcttcagggagagtggcccagggtagtctttagagagcctttcagctctacatccttgaccaccgctggatctgccactggtgggatctgatggtatctgagtccctcatggtacccacatgactccacctcgtctttttcttcctcagttcaggacttgctctgggctgagagggggatggaactgccctccagttcctctttctactcttctcagaacacctctaacattggtggtccccagtcaccattcacagccccaaagcaagcctgcctctctgacactggctctggtactcattaactgcaacatctccccttcctggaagtttgacagtctcacatttacagcatctctctgtcagagatgtttgtctagaagcttccagaaagggcagagaataagaggtttcaaggctacagcggagaaccacgagaagggctaagctccccaaactacttggcacaaacagatgacagccttttggtctctctgtgaatgcacaatgttgcctaaaccataccttgactcataataatatttcactattgatccacacaggatttattagtaactcattaactagctagcttaagattacagtaagctcccataaatctacacagaaactggggcttagagcaccctctatactcatgaaattccttgtcgtctctcacatgcacacccatgcccctgctgaggtagaagggcaagtctcttttgcatattaatttaacaaaaattggctgcacctgtttactatccacttggctgatgtaagccccgcccatccgcagtcccatgtctattattctcctgcttcttcacaaaaaggattcggagctatgggtaacctgtcggcattttacccttgttactcaattgctaatgttccatttcatttgagataacttatagttttatttttacttccgtgtaatattttattgtgtgactgtatttacaggcagattcttaaaagctggctcaagaccaagtcttaaaactgagacaggctcgttaatgtactgattcaacaccatttattcaatattcactctatctcacccataaaaagagtttagatgcggggattaatggcgcagtcatggttccgtgactgtggagcagtgttttaacttgactcactgtttcctgccttttgtttgtgaacgaggacgatattctgtacagtacaggcttgactgagcagccagcagtgggagacattgcctgacgggagtatcaggccacttcagctcaaaatgagcagccaaagcgcaaaaaggtgtagactgcactgttgttgttgttgttgttgttgctgttgttgttgttgttgttccttctgtgtcttggcttctagaataactttcatccatcataggtagtcaatgcctagtgaattagtaaaaaacaaaacaaaaacaaaaattcatcccacctgctccaactaatggaagcatgtacacacaggtacagtcaataaaaaagaatgcacctatgggaaggatccactcaacaaatgctctcagcatccacaaccccctctagccttatgtggataccctaacctgcttaacatccaagggcacgggtccacagacaaagcccactcactgtgttaatgctccaaacgaacacaggttcatctccttctctgatgcttctgcctcccctccagccatgcccacttctctgcagcttcttccatcacccacacttgcacctgagtgccagtacctttctgtcattcaagttacaactcagatgtgacctctctaactgttctcaccctttcccttggccccatcttcatccagatactgtcttcttatccccactttctcctgaaagctcccctcaagccctctggggtttttttctggcttatctatttgtagtcacacatatacccccaagccctccaagggccctcagttgtcttctgggggggacctctctttatctgctgggatgaatgcttattaacctctgacatcttcttcttagtggatcagggtctggcacagtatggatatttctcattcatctgtttagtttagccattattgaatgctaaccactgtggttaccacacacttggtttcagttctttttaatctggagctgactaggttaaatggaaaggctttgcctgttgtgtgtaaattgctgttcgtctcgttatctcctgactaggtgtccgtaggaccaggtgctctgagctgctctcatcctcgtcctgaaagttaccctctccggccagtttggtgatgaccaaggaggcagaaagttcagggcaagatacactttctaggaacttgcctctaggatctaactcctttcatgaggccacactcccaaacttttaccgtttcccaataatgccattgtgtttatgaatctatcagtcaattaatccattaaaccaatgatcttgtcaattctggagatgtcaacacagacatacccagaatgtgattcaccatgtcctaggcatttctgtgtatgtgtgtgcacatgtttgtgcatatgtgcatatgtgtgtacatgtctgtatcatgtgtatgtggaaggcagaggtcgacggtaggtgtcttcctcgattactctccaccttatttttgagacagggtctttcactgaatctgaggctcactgattttctagactagatagcagcaagtctcagaggagtctcctgtctccacctcctcagagccaggattctaggggtgtaccactacactcagccttatatgtgggtgctactaatctaaactcaagccttcatgcttattaacttcaagcaattaaccaagagagacatctacacagcccttcacaggcatttctaagtccagtcaagctgacatcatagaggatcagggggttggagaggaactcagtggataagagtccttaaccactgagctgatgccctcgtctggcctccacaggtaccaggcacagaaatggtacacagacatacatgtgagcaaaattcctatacacataaaaatatttttagatagaaaagtgtagttgtaagaagtttgctcctatctactgctgaaatcctattgtgtagataatccacaatttattttgctactcaaccattaagggtttcccaatgtttagctattacaaacaatgctactgtgaaaactcaagaatatatatatatatatatatatatatatatatatatatatatttcttgtgattacatcccacagtagatctgctgagccatcaatctataaaccagccctgtgattactatcaaatcacttaatcaaagcactgctatagtttatatcccactagcaagcatagacatcccagttgctccatgtcctgtgttctcaccaacacttaatattgtcagtgttttaactttagcctttctaatgtatggaggaagagagagagagagagagagttagttcactgaagcctgagtttacatttatgtaatgaataacggcagtgaacatcttttgacattattggacatttaagcatcccctttatttgtttctacaaaaaaatacaatatatgtaaaaataagcaaatgattgacaaaggaagaagcaatacagataacagtcgggcagccaatcgtttctgaggctcctaacgagtctctacaagtggcaaactagttgaggcaggtcaaataggggtatgggtgaatttttcatttcatctggtagcttatacgtagcaggaagaatatacccaggaagtgggccctgctggtccagatctcaaaggttccctcactcaacttaatctgttcccttccattgcaggagtcagacagtggccaacccctcaacaaccgtggtaagttcacatccccaagtctttgaatctcagctactgagtgagccaccattgtgctaatgctatgtgtgacctcagtccaccatccatccattcttcaacaagaagtactaagtactcatacgttccaggatttgtttaaaaaaaaaaaaaaaaaaaaaaaaaaaaaaaagcttggtctctggggaatatgaccagcagcctgatggccaagaacagtgactccccaggctattctgccagaccctgatctgcatggagttgggttgagcaatagagcagcgtaggccctggtcacatggagttcatgccaccaagaattcgggacactggtgttttactgttaggaaagaaaatagctgtggatctctgactaaaggagacagataagtgaatcagtaaaaagctcccagctttaagggttttacccctcctattatattttcttgaatgcttacttctgagagccttcatatcggcaagacgaatgaacagggaacatatccataagacaatgagcaatcccactcatattaacgttttatttgaatcacaagttaataataaccagaaacaataactcggcgagtagaaacagtacctcctttgtgctctggagttaatgtaacagtagaccacagagtccccaaagagcaccaggcttcccatggctcttcctgtgcctcacccaatgaacaaacccaacaactgccaaaccagaacacctggtggaaaggaagctgaaaggagagaccgtgcagctgctcaggtgatggggaacactgtataaaccaggctagatgagtcagccagccatggatgggggtggcgatggggtgagatctgagctcctgagtcccagaagtcaggaataacactcaggtcatttggcaccagaaaaccagcctgtggatgtaactgtgtgtgtgtgtgtgtgtgtgtgtgtgtgtgtgtgtgtgacgctgaattagccgtgagatccatttgggtagtgaatgaagtcaattacacagcgtaaaaggttcagagtactaaagtccagaagtaaatgtgaccagagtccctgttgtcactcaagagggaagggacaggggaaataccactttcctggaagctctatctaaaagcaatggcaggacaaacagacagaaggaacaaccacaggcatggaggatatttctaaactttagttaagttccttcctgaggaatatcccttccagagaaggaagagccaggacacacctttgggcttggacacaatccaatagattgttcgataacggtgaaaacaagtcaacctcatgtccccagaagcaggtgaccagtaaacatatcatgcatggatgactgaacaaaatattgatgtgtccgtggccatgggaacagggtaattatgaagacttgatgtaaggacttttaaaaaaaacaggaccagctagtattattgataaaattactttgtggcaggtcctaacaacttacaggccataccatgtcttttttcacatccttagtactgggcctctgtacagttaaaactctccatcagggaggcacagagtttgagctttcttatcaggccattgataccatcatgtatggggcactggcctctggcagacatcagtctgagtttcagctgagcagaggactgtgggtagagccagacacatgactggcactgtctgagaccgaataaagtgagcttggagaagggctgacaggatgcgcctaaaagaacagagccaaggatggatcgtttcccatctcgtggacactagttgggtgtctactgtggaccttgctctaggcactggagactcggaaatgcacaaaagacaccgtcttccatggtggcttcatttccatttcagggaggggtgagaggagacagaaaacaagccaaagtaggtcagagatgataagtgctttgggagaaaaacaggcaagaggggaagatgggaaatgcacagtggtcttatcttaaacaggaaaatctagagtgggctcacacagaagagacttgaaagaaaggctggaagctgagggagtgagccatgtaggtgtggaggcaggagagaggccgcctgctgctttctaggtttctgaggctctcaagcttcttgcccagcccccccttggggaggaaggctcccacatgagttcattgcctgaaggaaagggacctgaaaaggtccagagcctgtctctgatgccaactgaggacttttcgcaaccttgtcataccccatctccttggccacccaagtgttcttttgtgtcactgtgaccgatacacctgacacaaacaacttcatggacacaggactcattctgaaataatgccaggatgtttcagtccatgaaagagtgttagcagaacaattcacatgatgtcgcagaaaatgggattcacagaaggaaattttaaaagtaggcaaagaaagtagactcccaaatataaaccctcgagatctacttgctccagctcaaccttaacttcccaagtttctagacatttccaaaatagtatcaccatttggggaccaaacattcaaaactgtgagcctgttgtatcatttcagattccgactatgacactctatgaaacaaaggtgggactgcttgattgtttatttgtttgttttacaattttcaggcaatgggagcctccgatgtgagctccctggtcccaatctctttcattccaaccctcttcctccctgacaatgagtgaatcctctctaggtaatagtctcatcacacaccctctcttgttcggagcgttcagtggctcctcagttctgtcaggacaaatgcccaaccctagtctggtattcaagtctccacaaaaggcctttgtcgttctgcctcccaacaggctttgacccacttcatactctaggacactagatgctcacagcaccccctctgtgcctgggtctgcactgtcccagagcctctgtcccgtttcttcatgtatcaaagtaccacccactcaggaagcctttcccagcattccccaggtgatgtctctactctaccttcttccacctggtggactgccatttgtcctgtttgcttcttctccgagactctaatctccttaaagacaaggaccatgctggggacttgctctgtgttggactaacttggaggtgggggccatcataatacataataactcacaagtgctatcaaaactctgctaccccttcactgtgtgggggaggcaaaaaaataaggcagtgggcaagggattgggctcaggtggtagaatacttacctaacatgtgtaaacccttgggtttcatccccaaccctgcagaaaccagcagtggtgttatatgcctcaaattccagcactaggaggattgaaagctcaaggtcatcctggtctacatatagaatatgaggctagcctggactaggtcatcttggtctatttctcgaacatgaggctagcctgggctacatgatctagctctcctgccctttaaaaaaaaagttatcagagaaacaactgtagtaaagaggagggaaggactgataggggtcgagtctaatgttctccagcactgcagagtaacctgcagttgatgacatttgatgtcccagaagagctagtgagagaattctgggtgtcccccacatatgcacagaaataaatgtcctgcacgataaacagtaattaccctgatcttatcattgtgtgatacatgtgttattataacatacatgtgttgaaatgttacactatactccccaaacacaattatgcattgattaaaaatgaaaacatattcaagaatggggccaggacaaatgataacatttcatatatatcatggtaagtgcccaagtgcatatgtgacaatcttgggcccctcccagggcaggtacaggtcagacccatcaagaatgacatcttgtcaaaggtagggcaagacaaggggaggtggcaggcgctgccgtctcctttgagaagtagttatgaaagataggtgaatccggtcgagggaggaaaggttcttaaagctcagctttgcctgcagggataatccccaccaaactgtcgccagggcgtccagggcagagggctatgggccttggcggggctgggttctgagtgctcactgcgcgcttctccctctgtctttctccttgcagatattgttccctttcgcaaaccccgaaggccccaggagaccttcaaaaaggtggggatccccatcattgcagtgctgctgagcctgatagccctcgtgattgtggcccttctcagtgagttacagcccccacacagctttcaccccacccctctcccctctgagcccccattctcaccctcaccccctcagccagctacagccctcaccatgcaccagtcctcccatgcacagtgataggcaggtgatctgcacagagctttgggtgtgtggtgtggggggggggtaaatgaattctcatgcctcatgtattctcatgcctgcttaggaggtagccttctaagtgcaaggggaaggtgagcgcacccctccgttctcccagatggcttctcttccagatggttgctacacacgtggcacccattccaaacccacacaggcagtggcagaggtgcccacccccagctgcctccttcccatctcctgcaaactgacagctggtggtggagcagggtgagggggctggctggatgtctgtgcagccctacagctgtcaggctagagagtatttctgcctgtagagattggaggcaaaaggggtactagggaagatgactgggcagagagaactctctgcccaccccagctcagtcttcatgaacccggatgtcatctcaggcagcacactctgcgacaatgatttccagagttacagcagagacgggccactgctttcacagcacggagctgagcatagaagacaagcttaggagtcagggatggggatcatggctcctccagggaacctgtgcacccagataggagtccactgagcccctcaagtatgaaatgcctttaagcattacaaagaacaatgagaaaccttatgtgcagaacctggattaaaaaccaagagcatgtagcaggcagagcagggacccagggcacgtagtacctgtacaaccagggcatggcccacccttggggagccttacttagcgctcaggtgacatttgcactcgcagcagacaccacccattggatggcacacagagaccttctgcttgaacccttaattctacagttggacactgaggttcaaagcccaggcaaggcaagcaggaacagaggctgggatgggactccagttctctggctgaccagatcctcctcgtagtaacagtgggtatccacaagtcagacactaccttgatccttgagagcaccagggtggttatgcaatgtataaatcatttcttctccacctgagatggtccaacctgagggcagctatgttcgttagtgtttcattactgtagcaaacaccagaaaataactcccaaaagttgtcctctgacctccagtcagggacacacatgctcacacgcccgcccgcccgcacacactacagaaatgatttatttttaaaattggctgcctgcctccagccagcctgactttcagaaaaagcagcccctctctgtccccaatcgcctgcttgaccccagtccactctgctcctccctaatgtaccttccagtcaaggtgattctggataaatactacttcatctgcggcagtcccctgaccttcattcagaggggccagttgtgtgacggccaccttgactgcgcctcaggggaggatgaggaacactgtgtcaaggacttccctgaaaagcccggagtggcaggtgagtccagggactgaagggcaggggcagtgggggatgtctgctcagatgtggtctctgcccctcttctttgtcattgtctagccctggtagaaaaggtccccaagagcagggccatgacacatctaccattagatcccagcactggacaggaagtccttctctctcgggaagggtttaatggtccccaggggacaagggagcattgctgatactatgctggttgttgccgcctttctagagtgcacgaccttgaaggttcctctttgataactccaggagactagaaaggttgtcaccgtgtcatttagccagccagccacccttctgttcatggacatactagagaacaggacagagggaggtgactgaagagcaagtgtctcaagcataaaagctgggctcctccagcttggattgacccactaacacttagcccagaagatagttataagatcctttgaggggcagggctgagtgatgtcccaggcattggctcttaactagtaaagtcaaatgcctgtgggtgcctgccatcctcataccaatacaccaacagaggttttcactccaattcttttctgacctttcatagagaagctaccaggtccctggctgagatgcttccccaaaccaggggagctgtgtaggccatggtaaagcaattttgtcagtggtcatcgaagctgatacttatctgagcagaaagagaggctgtcagtcgttgtccctgggcagctggtcaagttttcccgtagctgccgtccaaattaggctctagtcaactggaagaacttcccttgaggttgaacatgtcctcagttctgggttggggagcagcggcaagggagggggctggtctcatgacatgttccaagggtcttggataaagtggccttaccctccagctgacccaggcgccttccctcctagtccggctctccaaggacagatccaccctgcaggtgctggatgcagccacagggacctgggcctcagtctgtttcgacaacttcacagaagcactggccaagacagcctgcagacagatgggctatgacaggtactcaatcggggccataggaagctgtcacctcacgccagcaacctctctgcctgccgtccttccttccttccttccttccatccttccttcctttgtgcctgcctgcctctcttcttccttccctccctccctcctttatttcctatttcctttccctaaaaacacagacacaggatttataaagaaccacgtttgaatcccagcactttcattaacaaagagcatagagataattccccagcgtcagtttcctcagagttactaatgtcaatcttataagagttttcttttctccccaacttcctctcctttgccctttcgtgagaagtcttccccaaccataacacacacaaaaaacatttcatatgcaaagtcatctaggttaaaatttagcaggcaggaaggctgggggtgtagctctgggggtagagcacttacctagcacgtgcaaagccctgagttctgttctctgcacttgaaaacaaaaatagcaaggactagcctggttctgttggggccatcaccagaggcccagctctctcatggaagtgcgaagcaggagtggtaggaaggtatgtgaagggtaattagcattacatatagttatattcatttgatcttggcagacagctcaaagcatggttattattaaatctgtgttagaagcgggctctcagagaagaagcagcttgctcaggcagaagctgggaggtagaggttagaatctgtacctgctttaacccattcctggacaccatgagttctcatagtggtctgtttgtacatcgaattctctctactcacaaggcttcaccagcgaaggaaaggagagtgagaattgatccctcgaggagcctacctgaaaggagcccaggtgatctgctgcaggcaggggtcacactctccctagcagtctgcctcagacagacattgcctgtcgatcacagttctccccatagatccctaaagcagcctcaaggttttgtacagtagatgttctgggcagccagaatgaatccatatgacctctgtccctctgacccttctttgtaaaggtcctgctctcttccctccagaggaggagaactcccagcactgtctagaaaagggacacctgtcacctcatttccaaggacagcatgcccagtacctgctgtcctctacttcccctgcagccatcccctcccccactgcagtccagcccactgcagcgtcagctggaccagatgcagcaggctgtctcagttatgaaacccggagtttcctgaggttcttaaagtggtagactcccagatttcctacacttctagaaagcactgaagcaccagtcagcaccacttggcctctttcttcagctctaggatatcaaagttcattacatcactgcccaggttagctttgctgggcgtgtttactgacagcctcctctctccttctgggtcagaactctctgctcaaatctctctgctttctttcctacctggattggaaggaaacctttctgacctaggaatgcaaagccataggtggtccagtgtaggagtcagggaccacctggctcatgcatcattttatggagaaaattgggacttggggagacacataggacaaacatgacttgcccatggtcacacaccaaactggtgtcaaatccagcatattggaacttaagtcttgggagctctgtagacagactctggtcatcccagctccagcacctagttcatcaagaaaatgtttgcagtcctatctgagtgtggactagccagccagggacatgaattgaccccagatatctatgcaaagcttgacctgagaggacagactggagaagaagggggaaatccaaaagacgaaaatttagtgaagaaagagccagagaacagaatagttaaggaaggcttcctggaggaggaagacttgaatatggggtttgaaagaagacaaacatggattagcagaaaggaagggagagggcggtccaagtttcaggaagttccatccagactcttataagaattgatccaggcttctcctgtctccaggccccttatatggaaaaccaaatgtccacactccagttccctctgtgctgagacaggagttcatctgggtccccttgcttctttgctcctgctgatgtgaccctaacgagatactgggacatctgagacagggacagagctgggtgtgaggaaagcaggcccctagtcctctgcagagctccacttctgggccaggagtccctgcccaggaaagcgaggccacggcagcctgccttgatgtggggactattcctgctatccagcaaagccagccagccgtgccccactaacctgtgccccctcctctgggagcaggggctctttctgccatgtaattcatcctctgccccagctcacagttcactcttcctaccacagccagcccgctttcagagcagtggagatccgtccagatcagaacctccctgttgctcaagtcacaggaaacagccaggaacttcaggtgcagaatggaagcaggtaagcgagaggggacattctgacctgcagaggctaactaacactgggaagtggctcaaggttgcagcaaggggaacacgagccagacaacgggaagaactagccaagcagctcattaaatgtccagggttttgggattccactttcaggctcaggggtattttctgtctgcctttttctttaatacagcatgcattgtcctgctcaaaggcagagcaatgaacagtgaccttctctctccctgaactgtcaagattcatgccttccacagctccttcatgttccctagtgagttacctggtaggcaagagcctaaaagtagctttgtacttttccatcacttccccaggccaaagcaccaccttctaacgctccacagaaggctctccagccctcacctcaccaccccacattagagcacagctgattcaaaacaacatttgctacaaagcagccaaggctccaggagaaggctggcgtcttagcattcaggacgctggacagagccttaacacagtaactcaataactctttattttattttattttatttttatttttgtatcaaaaattgtttaaattttttattggatattttctttatttacaatacaaatattatgtcctttcccggtttccctccctaccagaaacaccctatcacattctccctccccctgcttctataagggtgttcctccacccacccacccactcccacctcccctccctcgattcccctacactgggagccttcataggaccaaggacctctcctcccactgatgcatgacaaggctgtcctctgctacatatgcagctggagccaacacagtaactcttgaaaaggaccaggttagaggtagaatctgcaggattccatcaaaatcctggtctgtttgggaggccacagtgcagcaggttctgctccccaccaccaccacctgctgcccagggttccaggagcccagactggctttgcattgggcaggactccgtatattgtaggtacacgcacagcaacagcagtgttgcactaaatcaaaccacactgagtataatgcagatctacacacacccatggtaaagtttctggggttctgcagtgttgggggatggggttgaatcagcagttcacaaaggctgagttctaacctcccagccaaggcgaaagcagaagccacagggccccgtctttctctttcagatcctgcctctcaggctccctggtttccttgcactgccttggtgagttcaccctatctctgagagtctggggcctaggccagcaatggtcaggaagaaagaccttcatcctcactgctctgtctcctggtctctaagtcccactctttggggccaaccttagacttacagatcagtggttccttcacgtggttaatgccaagaacccccttatgccatctgctctcagttcatgacctgagtgtgttagattttcattgctgtactgaaatatctgaggcaggataatgtcataaagaagttttgcttagcttacagttttagaatctggaggcctaagaccagaaagccaccttggtttggcctcaagtgctggcctactgttgggtggtggatcggatgtaggtgaaacaagaaaccagacagcagggtgggctcagtcttgtcctaagttctcaaagacactcagggatcatagaaaactactttatccccctcagagggcagctgctctgatgacctaagggccattaggcctcacatcttaaagagcccaccactttatcatcaccatactcagggctaagctgccacctttgtggaggcacactcaaaccataacctaactgttccggagacttccgagcaggtcactggctggatggaagctttgataaggccatgtaaagcagtccataagactgtagacccccccatcttgccaaccaagaaactttgagtgagtgagcacagagcaagttgaaagcagggttgggtcagatagcatttggcaggtacggaaccaggcagggaagagatgatgggaaaggggcctctttggaaagaccagagaggcacagaacatggcagggatgtggcactggaggctttagtttggggtttgttttgtctttaattatggggcaggtatgtgcatgtgcctgcagcacctgtggataccagcagaaagcatcagatgctctgggtggttagaagcagtcgtgagctgcctgttgtgggtactgggaaccaaactcgagtctctgagagagaaggaggcacccttagccactgagccatctctccatccctgacactgaaagttttaactcaagttcaaaggtcagatgtaaaaggtagaccagaagacagggtaaccgatgggcagctcccttaacagaaggaagaaacccagttcctagaacgtgcgtattccctgataccaaagtagcttgtgagtatctgtttactcagtggggagtttctagggactgtccatttgggcagggctttcagaattcatgattccacgccctggtttgaagatgataaattcccagcacaatggtcacatccatgttaaaaaatctaaattcctaaacacacactagaggtgggtttcaggggaacctgtgggtcgtgctcgatatctccccacggatgattcagggctggtgtgggtggattctcccatccttcccatactatttctgagggccctgctccaggggtctctggggaagcatcccctccccagaagcctgactccccctccttcctttccccccattgagtccagactgtggaaagagcctgaagactcctcgtgtggtgggtggggtggaggcccctgtggattcttggccgtggcaggtcagcatccagtacaacaagcagcatgtctgtggtgggagcatcctggatccccactggatcctcacagcagcccactgcttcaggtaagtgtgacgaggaagctaggagagagagagaggccatggagggagccagccttgctccctgattgtgcacccatgccccgccccatctaccctggaaaccatctctagtgtgcagcctctgtgcaatgagacaccagccatgacatccttgttaattaagtactgaaaaatctgtgctggtctccaaggttgaactctattgggtggaaagctccagatacccaggatcctcccatcatagcgtgtccattccattcatgctacagaagcgctccccacacatctgggctcccgagaacttgtctcctccttgcaagtcctccaggaaatgacaccaagatctagagtcactgcctatgtctagaaagtgtagagtatccttcaggccagaagagagggagctggctagggaaagccttgggaaaggggctccacccagggcttctccattttcctttattcatttcattcagcatctagagagtaccagccagcccttcagtctgtgtgcaccacataaatctcattgttgccttcaaggaccccaggtcgagatcaggcgtttttcactgttttgaggctgataagggcactaaatcccctcctaggcaggtcctgcacacaggcagtgcctgatgtaaagaagaacaaacaaaagcttgagccgggcagtggtggtgcacgcctttaatcccagcacttgggaggcagaggcagagcaggcagatttatgagttcgaggccagcctggtctacagagtgagttccaggacagccaggggtacacagagaaaccctgtctcaaaaaaacaaaacaaaacaacaacaaaaacagcttgaaagctcacagatggcaatgcaaagataaaaacaaggctggaggagaggctgcccagtcatgaaggcccaggagtagggcaagccattcccaagccctctgggtagaagtttccttgtgtgttttttatgaagaaaaagaatcagatctccttttctaatttggcttcaggagggaggctctcagactgtcttttccaccaaccctgtctctatcatcccatgacctcctaaagcatcagcagacttggggacctaaccctaggtaggcagagcctctaggtgtgtggatcccccctgatctagctatctctatccctaggaagtatcttgatgtgtcaagctggaaggtcagggcaggctcaaacatactgggtaactctccatccttgcctgtggccaagatcttcatcgctgaacccaatcctctgtaccccaaagagaaggacattgcccttgttaagctgcagatgccactcacattctcaggtaggaggtggtccctggtaacagggccccccaggttaaccttactcaggttctgctaagcagctttggatacatcatgttcccactcaagatctcagcttgcctgtgggtatccaactagtatgttcactcaatatcattggtgccacaagaccggccctagctgtcaagctgacatgcacatcttcttgggcagagattcttccaagtctgtttgctctatctggaagatcaaggtcatctgctcttggcttgtcaggaccctctttaaagaattgtctgacccattgctcacccctgaccagtgcccaaggccctgcacaataactccgccagagtgtcagtgtgctgctgcttgttttcctccaggaacaaggaacctagcattttctggtttttcctttgtgtgtgcatgtgcgtgtgtcaggagacaggggggggggggcgaggaaggaggtgaacagctcaagtgatgtttgtggttcccagggaccactgtggggaggttgggtgggcaagattgagcatgcttgagaataactgtctagcctgcagaggttgacctctgactgctcagtacctagatttgagtgatttggggcagagaatactggcttggagcgtgaaggtatgtgaggtcaaaatgggggctctagattaatttgtttacacgccgagggcctcactggtaagtggtttattctctctaggaactagctagcctagtctcacttagaccagcaaaatccccaacatgagaaggcaccagatgtagaaaacaataagccatccctaatctagaatcttcttcccctctgctcctggtaggctcagtcaggcccatctgcctgcccttctctgatgaggtgcttgtcccagccacaccagtctgggtcattggatggggctttacagaagaaaacggaggtgagtcttagcctcagaacctcagctgccttccatgagggccttattaccctccccagtggtaacaagaaagaagaatatccttcagaaaagtccaccctgactgaccaggcaccaaagtttccagcagcaaaaagtatcgagggcccagaaaattaacctgggctgagggtaaaggagaaactaaggaaatacgttgctttcaacctcccaggaaagatgtctgacatgctactgcaggcatcagtccaggtcatcgacagcacacggtgcaatgcagaggatgcctacgaaggggaagtgaccgctgagatgctgtgtgcaggtaccccacagggtggcaaggacacctgccaggtgggtcctccgaagaccgcagggagctctgtgaagagggatgcaagtcctagagagatgtgaacccctacaagctggatgcccatgtggaggttgtagcgctcagtttgtgataaaggaaggcataaatatggtctgagaaagttagaaggagggatgggtggataggtgatagttggctctagacgagggaaaagaatctaaatttcacatttaaagatgacattgctactttctctacccaccctcactccccatcatctatgccccctttggggacagtggctccaggtctattttccctctcactgtccctgttctttattagaaagctcatctcatgctaggcgagctttggtacatgggtctgcccccatctccatggccaacgggacttgtgagcgattccgatgtacgatgtaccttcttaacaccccagaccccagaggatctctggagccatttttattcaaatttctcagtctacacccatctccagacattaaaatcctcacttgagagctgtctctaaatctttccttgtgggccatgaacatggcagatttaaagaccgactgtgcctgcccttcaggaactcatggtggtcacacagatggccatagtgtcactgctctcagagagaggcagtgagtgtaggtttcactacttgatttctttcatctgctcattcattggctctgtcaacccttttgatcataaacttcctgaaggcaaagatcttttttcaagtccattgaatctcagttatgcagagcatgacggtaccacagacaggccctccacggcaagtcaatagatgtaggaactactggacttaaactaagttcactttgctagtgtgacttatgagcctctgataaggcaggcagtatgccctcaacttacctgcccacagatgggccattcccctctcccccaagagtaacggacactgaacaatatgagcaagaaggagggtggagaagtgagcatgtgcagagccacagaaagggcaggggtggggtgaggtggcgtgaggtggggggacagatgggcctgccctctccagcagctcctgccctgactttccacagggtgacagtggtgggcctttgatgtaccattctgacaagtggcaggtagtaggcatcgtgagctggggccatggatgcggcggcccaagtactcctggagtgtataccaaggtcactgcctatctcaactggatctacaatgttcggaaggtgagtgttccagccccacaggaagccctccctcgatacttgatttctaccctgagggcatgcagcatccttagatttgatttagatagctctgacaaccttctacatcccaagtacacttccttccctgcaagctgacagcctgagatctctcaattgaagccaagattccttagattggtgatcctgtgaaatgcaaataactcatggcacagaatctccagcttcaccgtcctctgtagccagagtgagcctgctgggccctttccagggagatgatgctaagaatgaagaaagggttgtgaggtgtcctggtcccaggagaggagagtgggcaaacaggcaagcaaaatgatcttaggaaaggaagatcctgtcaaccctgtcactcctttgttgatttggagtcatctgattttctgtctgccgttgcctttttttctttctagtctgagatgtaacgctgccgtcccccacatccagaagctgcttcccttcagacctacctacggcatgacccctcaaagtcagatatgggacaagagcctccttgaacaaactctggtatccctgcagcaagcaaggatacattgcagaggtgcccggagtggagtcagatgggctagctcagccacccctgcatctcccaaaccctgggagacatgtggcccatgggagtaaatccaggacattgactcaactctcagaagtgttattcagtcaaggaggctctcccttccactgaaggaaggaaagtcagctctctcctgaaaggccagatcactggctgagtagatgagacaagggtatgaaaggcctttgccatcttctttgcccagtcctgaaagcactgacgtaagagaccagtcagttctaatgtaaggtgtatattttagtgtcagggtattgcaattgtcacccctgtggtcaatatcattaaacaggtatgagaattcgctggcatagacttcctggtctgcttaataagaatccaactaaggatgtcacatgacagtttcccagaaaatgtgaacaagtgtccatctgacacacggcaccaatgacaaaccaaagaagttattctgcctgagtctcagttgctgaactaataaattagctgcggtttcttgcatatgcgtgggtaacttgaaggcggctgcctcaccaacataagaatgcatgaaagagacatcactgaaattttctgcacagcgttcagtttcaccgcgaagctctatcctgtgtatcgctgttcccctggcaattggtgactgcttgtgtgtccttggaaaggacctcaggagtcttatgactctctgggcttcttgcacctatagatctcataagccacgcctctcattagctttctatgtctcacaagcctccctcctctctccaggaaagactcttcaattccaagaagattacactcaatactctatcccttcttctggctctcacatgttttcacttgttttgctttaacctcctcctcttcgggtgatgttccctgagcctcagacacagtgttgtagtcagctgatgtcttagttagggattctactgctctgataaacgctaagaccaaaagccagctggggaggaaaaggtttatttcaacttatagctcccaggctatggtccaccactgaggggagccctggcagaaactgaaagcaggaaccatggggcaggcactgaagcagaatccacggcagcatgctgcttattggattgctcctccgcttgttagattgcctagctcgattgcttgtaccactcagcccaggagcccaggagtggcacagcccagactgggctaggtctttctctatccgctagcaattatggccacgcatatgagccatcgggtggaagcatttctcagttgaggtttctcttcccacttgatgctagtagccatatcaagttgatgaaaaaaaaaaaaaactaaccaggacacgtagttattttctgccacttcactactggggccactatgtgacagcaactgtcacttactcttaataattcattacaagtctccagagtaaccactgccaactgcaaaaaaaaaaaaaaaggaaagaaatttccctccataactaagctgactgcagcagtaatctatagatataaacataaatgtctagaaggcaattagacatatcatattcatttatcaatgacaatagcttccctcttggagccaggagcctctctggcaacaagtctttgttctgacttacataccaaacatgagctccctcctgtgcagcaggacttatttctcactagaaagtagttagccacacctatcacagttgaccacacccattacaattggccacacctatcacagatggccccgcccacagcagtgtgtcacacctatcacagttggccacacacatcacagttggccacacctttcacagttggccacacccaccgcagttggtcacacctgtcaagtgggccacacccatcacagttggccacacctatcacagttggtcacacccacaacagtgtatcacaaacccatcacatttggccacagccatcacagttggtcacacccatcacagttggccatacccatcacagttggccacacccatcacagttgcatcactatagcactacagccacatcttatctggcatattgattgtattagtcagggttttactgctgtgaacagacaccatgaccaaggcaagtcttataaaaaacaacatttaattggggctggcttacaggttcagaggttcagtccattatcatcaaggtgggagcatggcagtatccaggcaggcatggcgcaggaggaactgagagttctatgtcttcatccaaaggctactagtggaagactgacttccaggcaactagggtgaggatcttatacccacacccacagtgacacacccattccaaccaggtcacacctattccaacaaggccacatcttcagatggtgccactctctggtccaaggatatacaaaccatcacattgatgatgtagcactcggggtcaaataacagcaggactgtcaacaattttcctctggcataggataacactttctggcactggaaaaagacatggggccggaagtaagtttccagaccaaccccagcctcatttctctctgtcttacacagaagtgtatgatagcttcaacaataagaactcgccatctacttctggcatacaaccaacagcaatggcaataacatttatggcttaaggggcctcctcaggggctttgtggccaacaacttacagggtggtaatccacctttggtacgaagattctattcggtaaccttatggcttctggctatgcctcttccacccacacggagtgtcttcacataagctctttaattgctgcttttttttttaactgttcttccagatgcctttccaaatctgtaagatactcaaggtttagtgttatataatacaactttttatagaggatagacagcctctcagaaggcccaccaccatctgctccaggcaagtgccaattggtcttgagagtcagcagccaagggcacagttaaaataaaatgttagcaagctccaatgccacgtgaaagacactagcactgatactagttgtccagtcagtgagcagggttgggtacagcagtatggggagactttcccatccagctttccataattctcttagtcactgctctatggctgtgaagagacaccacaaccaaggcaactcttatagaagaagcatttcattgggccttgcttacagttgcagaggtccagtccattatcatcatggtgggaaagcagaacatggtcctggagaagtagctgagagttctctatctgtatctgcaggcaagaggaagagagactgggcctgacttgggcttttgaaaccccaaagcccacccctagtgatgttttctccaaatattgccatactgcttcaacagggccacacctcctaatccttcccaaacaatacctgatgactatccatccgaatacataagcctaaggaccattcttattcaaaccaccacaataattgaccataatcttccatgagtcatttcatctcctcaccctggggacttgtggtaggaccacctcgcatccacatgtatccagtgagctgagcaaggtggacttacactgcttgggacagccagagccaggacaaacaaggtcatgctctcctcatcactggtgctggctccccaggtctgtcaggttctcaatttataccataaccgttacttctccatcaaccacacctggctcctgaacagactgaacaaaccttcatcctggtataccttcttgcaagggagaaacaaacacggtgttactaggggagtaagtatacatccctaggacaaacctaatatggttacacgtagtgttctgctgctagattcttcctttgaaattgtattttatttttattttattttactttactttattttattttagggttttttgagacagggtttctttgtgtatccctggctgtcctggaactcactttgtagaccaggttggcctcgaactcagaaatctacctgcctctacctcccgagtgctgggatccatggtgcaccaccacacccagcttgaaattttattttaattaatttaatcaatcaattcaatcaattatttatggatgttttgtctgcatgtatgtctttaccacatgcattactcatacccaaagatgccagaagatggcatggatgccctggaactgttgctaaagaggttgtgagctaccatgtaagtgctgggattgaatacaggtcctctggaagagcagccagtgctcttacctgataaagcatctctccagataccatttgataccccctacatgcatctttggtgaagttttgttcaatgtttaatgtcccccacccacccccacacccagaggctcacctaggtagcatttagctttctgtcatccccatcccttcccagggcttaacacaaatcttgtcacattttctttcaagtatctcaggcagcttcattgtctgccttccctttttgttcctattctcctggcgactgccttataaactcaacttacactcatctgaactgttcagatctgtcaacgcctcttctaaatcgtagagatggaattcgactgtggagttcagcaacgtggctaaagatctctgctgatttaatttctttctgaacacttcacttctctctggctcagtgagtgagagtcaaacaccaccatgccctctgtaccaagtcccttggtgatgcctgccttccctttggtgtcttctatactgtggtattcacaggggtctctactaacactaaccccatgtccctaatggctcataagaaccagtccatcccagactaatctcaggtaactcagcctctgcctagaggaggatgggtattatattattcagtttctctgcctccacagggcttagactgatatcattcaccccaaacagcttggatacagcatcatctctgattgtcatagcttcccatcctcggccactatgaaggtcctcatttgagtactgaacagagagcattcttctccactgcgctgaagtttgggcctacaaggtagcttccattacttctatttctcttccccacctacactccaactgactgtctgaggcttcccatgaatttcaagcctggggattccaggaagggctgtttagcagaaacctaaatcggactatctttttcttgcaccctgccatctgtaagacacagcaaggcgacacctccacctcatcacccctttcctcctctttctctgccaagtaagaggctaatgaggatgatagcatccttatctcgtttgctctcagttcctctcattcaggcagattcttctggacagatagctcatcttcccttgcatgtctgaccacccacagcaaagccacaggactgttgccacaatgtatttagaatcccatggcaaaagtcccacttagggagatagctatatagtatctagtccatcagctgtttgaaggggccgggtattcccactctcaggcagaaaacccaccaaaagacacaccacctattgcattaacttttcctggaaatacttgagcaaacatttattgtttccagattttgcatcaacagcagacaaaaggaatgagttccaccctagtctaccattgggtgagggctaagccacggcagtagaggcaatttatgagcaggtataccactaaagaaaatgtgcccccttcaacagcccactaacagctcatatatcctcaggaaggggtccatgcatctactgtactgtctcaaactactcattcctcccccttcttcatgacaggatatctgggtccaagcctgtgaggaagcaatcacagctcttctcattctaagacagcagtggtggtgctatgcccagaggacagcattacataatacaaccctatatcacacagaggaagatgtccatcctagatctgccccgcccccaagcccccgaggctgggatgttccacactaggattgctcagctttggttgcaaggcttatcatccacagcaggggacacacaaccgccactacttcgaagacgctgagtctggggaagacaggttaagtgtgattcccacacaagcctgtcccattgtcctcccatccctgatatccctgcctgatatcagccatgggataaagacaacacagatgaaccaaggacactatgttaagtgaaacaagcttgctataagatgcatcttatttcattctacttgtatgagatatataatcaaactaatgagcttgcaggagctggaaggggtgagcaatgaagagttatttgcttaacacagagttttagtttgttgttggcaatgatggtgaaagtggtggtaatggtggtgggagtagaaggatggagttggaggggagtgatggtggtgatggtagaggtggtggtggtgatgatgttagtgttggtgatggttttggatggtggttttggttttccaagagagggtttccctgtgtagtcctggctgtgctggaactcactctgtaaaccaggctggcctcaaacttaatgatcctcctgcctctgcctcccaagttctaggattaaaggtgtgcactacgtcgactggctcagagttttacttttacaagataaatcagttctgcgggtggatgactgtgaggtgacagcacagcacaaatgtgcctaacatcactgtgtgacacacttgacaaatggctaagacagccatgttgtgtgcacaatcacacttcagaaaagccatgcctgtaatcctagctgcttaggacactgaaggttcaaggctagcctgggctacagagtaagtttgccgagaccagccaatgaagtataagaccctatctgaaaacaaaaagttgaagaaaggcgagccggaaataaagttaccttacagagcacttgcttagcatgcacgagccccaggttcaatccccagtactttcaaagtcataaatgactgtattggtggcccaagagtgtggcagctgatggtgtgagctctgaagtcagaatgctcgtattaccagtcttaccttgggtcaggttcttaaccttagtgtgccttaatgttttccttgtctatgtccacagcatgaagctaagactagtaggtaaataaataatgtcttgtagggatgcgtgagtgttaaatgaatccgtacattcagagtagtgtctgtcacatagaagtatattttccacgaattattatcttagggtttctattgctatgaagaaacaccataaccatggcagctcttacaaagaaaaaacatttaactagggttaactagggttaaaaaacattaactagggttggcttacagttcagaggtttcaaccattttcatcatggcgggaagtatggtaacatacaggtagacatggtgatggagaaggagctgagagtactatatatgaatcagcaggcagcagaaagagccgccctgggcctggcttgatcatctgaaaccacaaaacctacccccagtgacacacttcctccagcaaggtcacacctcctgatcctttcaaatagtaccactccctataaacttatgggggccattttcatccatatcaccacagttattatgaaaaagtgtttcattacccactttatgtgttttctctctctctccacataaacacacacaaacaaaatcaaaataaacaaacaaaaacaccaaacaaaaatgccaaaacaaaataaaaagtacccccagaaagcagtggagttctgttgtggtaaatctccaaccccaaataagcccagtcaaagaaaacacaactcaataaatatgaatataagctgcacacctagattggacagatctatcactacactactatatttcccacctatgagacccccttataacttgtggtttctccaggccacgtgcttctcctccattctccttccactctctcttccctcctcctccttctgccccaaacttttcagctccgccttcccttccactgcccagtcaccagctctagcctttattttacaagttaaggtggggagagggttcacaagaattcacctgtattcgtgattcactcctcatccgcaacccctcccaggaaagcagaattagcatcaaaatacaagaccaggactattcacaacacttcccctttctgtccaattaaaagactctttttatctcagatataaattgagcacaactattacctttttgtaatttataaagaacaagatagacctaacacccagtctatcatttttgtcaattaaatagaacctctgtcatctatcctaacttaaaagactataattctacacctgactcatgtcctgacttggattgtatgtcatctgaaaaccatcctctcaaatctatatcatctctctcaatgttaaacagcttgggttggctataacactactggtctttaaccccatcagaaaactaagaatgactaatattacctgaaaatatgagaagcacaaaatatagcttctaaaacttagacaatttacagagaccactgatcacctggtcagtcccttatacttcaaaacattggagcatcggtcttctgacttctctcccaggatcacttggcagacctttgaaatgtggaattttgaagggctgattgcggcagagattattagtcgactattccatatagtgtgccttttttctggacagtatttggtctctagatgaaatgaggcaactcttgcctagtggctgtcttgccatgactggagcaactccactgatgctcaatttcttctttgaatccaagaaaggggtgatgtcaggagcagacaggtctctagccaaatgatctttaataaagaaattgttcataaacgtcatatcctgtggacttctgacgcctttgaagactatctaccaaaagcatttctgaactgttaagccttgactattctcagctatttctaatggaaatatctcagaaacaccctttaattaactcaggaccatgagtttgctatctggcccttaatccatattgtttaatcatctagaaacagtttataatatcaattatagaaggactgggtctaagttttgtattcttaaatgtgttatataggcgcaatgttgatatgagagtaacaatattaatctcaattttgtatcaataagaaattcataccaatgaaaactttacatttgtatcaaataaattctctatcaatgtaagagattataactttaacttcctatcaattgtaaagatttctaccaatgtaaaacatagctatgtaacattttgcataagagtaaatttgttaacctatccctatttgtcgatttctataattctataatattactatatcctccctttcttttccacccccttcccttttacctaagaaggaaggatagagaagaggaaaggaaaggtagaaatcctgagtttaagctctctagttccctccctgtccaaagctacatttgtaaagtatcccttaaacgacaacatgtctataatttataaaataaccagaactatccaccctaacataagggactggcatgatgaccttttgtctgttttcagctgaagtggggtgaagaattcccttctggaggcccaaagggaaataggaggattggctttgtcaaaggagagttagctggcatcgtttgcctcccaggcactctgtgctgagaaagttcattgtagagctgacatcttgaccatgacagtctgaaaggctggatagacaagctagctgttctggaaaagttttggaagcaagtctttgaaagaagcagcttcaatgaagttgagggaggaagagacaatcacgaagctgggatggaaagccccagatctcagcatccagggatgtgaatctttttagggctgtctttctcttctttcatcctgtagtatacaaaacttaaaagcaacatatagttctgcaaagacatttacatggagcgtgtagggtatacagattggtcaatgaagatcaataaagaaagaagactatctttcttcgggttagtttgatcacataatcaaactgtaatataacattttgtgttggtcaacgttattcctaggcatgaggcctgccctgtactgaggtttacatacccagtgacacaccattgtagaaaactgatttcctctttgccaatgaatatcaattgcaaatagtttctttgttaggcgtgggacctctgtttacttcctgggactccatctagcctgaatctgtgcatgtcttgtatgtctgcaacagtctctctgaggagaaagtggtgaaaagccttgaagatatgggcacaggggaaaaattcctgatcagaacaacaatggcttgttctgtaagatcgagaatggacaaatgggacctcacaaaattgcaaagcttctgtaaggcaaaagacactgtcaataaggcaaaagggccaccaacagattgggaaaggatctttaccaatcttaaatccaataggggactgatattcaatatatataaagaactcaagaagtt

SEQ ID NO: 136 - DNA, 2229 bp, Mus musculus
cggttgtgttataggacttgaccagccccaatagtcctcaagtcactcctagatacagtggcaggtggtagctggcttgcggaaggaagaggaagaagagaatgtgggccatcaaggagcaaggccagccttgcacttgggccccctctgctcagtgctgaccagggctttctgagccgcttcctaatgaggctcatttgaagaccccccccacccccctcctgctgtcttgggtggcagagctagctccaggctgtaagaaaattaggaggattaccaaagcagtatggagtcagacagtggccaacccctcaacaaccgtgatattgttccctttcgcaaaccccgaaggccccaggagaccttcaaaaaggtggggatccccatcattgcagtgctgctgagcctgatagccctcgtgattgtggcccttctcatcaaggtgattctggataaatactacttcatctgcggcagtcccctgaccttcattcagaggggccagttgtgtgacggccaccttgactgcgcctcaggggaggatgaggaacactgtgtcaaggacttccctgaaaagcccggagtggcagtccggctctccaaggacagatccaccctgcaggtgctggatgcagccacagggacctgggcctcagtctgtttcgacaacttcacagaagcactggccaagacagcctgcagacagatgggctatgacagccagcccgctttcagagcagtggagatccgtccagatcagaacctccctgttgctcaagtcacaggaaacagccaggaacttcaggtgcagaatggaagcagtccagactgtggaaagagcctgaagactcctcgtgtggtgggtggggtggaggcccctgtggattcttggccgtggcaggtcagcatccagtacaacaagcagcatgtctgtggtgggagcatcctggatccccactggatcctcacagcagcccactgcttcaggaagtatcttgatgtgtcaagctggaaggtcagggcaggctcaaacatactgggtaactctccatccttgcctgtggccaagatcttcatcgctgaacccaatcctctgtaccccaaagagaaggacattgcccttgttaagctgcagatgccactcacattctcaggctcagtcaggcccatctgcctgcccttctctgatgaggtgcttgtcccagccacaccagtctgggtcattggatggggctttacagaagaaaacggaggaaagatgtctgacatgctactgcaggcatcagtccaggtcatcgacagcacacggtgcaatgcagaggatgcctacgaaggggaagtgaccgctgagatgctgtgtgcaggtaccccacagggtggcaaggacacctgccagggtgacagtggtgggcctttgatgtaccattctgacaagtggcaggtagtaggcatcgtgagctggggccatggatgcggcggcccaagtactcctggagtgtataccaaggtcactgcctatctcaactggatctacaatgttcggaagtctgagatgtaacgctgccgtcccccacatccagaagctgcttcccttcagacctacctacggcatgacccctcaaagtcagatatgggacaagagcctccttgaacaaactctggtatccctgcagcaagcaaggatacattgcagaggtgcccggagtggagtcagatgggctagctcagccacccctgcatctcccaaaccctgggagacatgtggcccatgggagtaaatccaggacattgactcaactctcagaagtgttattcagtcaaggaggctctcccttccactgaaggaaggaaagtcagctctctcctgaaaggccagatcactggctgagtagatgagacaagggtatgaaaggcctttgccatcttctttgcccagtcctgaaagcactgacgtaagagaccagtcagttctaatgtaaggtgtatattttagtgtcagggtattgcaattgtcacccctgtggtcaatatcattaaacaggtatgagaattcgctggcatagacttcctggtctgcttaataagaatccaactaaggatgtcacatgacagtttcccagaaaatgtgaacaagtgtccatctgacacacggcaccaatgacaaaccaaagaagttattctgcctgagtctcagttgctgaactaataaattagctgcggtttcttgca

SEQ ID NO: 137 - protein, 425 aa, Mus musculus
EDYQSSMESDSGQPLNNRDIVPFRKPRRPQETFKKVGIPIIAVLLSLIALVIVLIKVILDKYYFICGSPLTFIQRGQLCDGHLDCASGEDEEHCVKDFPEKPGVAVRLSKDRSTLQVLDAATGTWASVCFDNFTEAKTACRQMGYDSQPAFRAVEIRPDQNLPVAQVTGNSQELQVQNGSSPDCGKSLKTPRVVGGVEAPVDSWPWQVSIQYNKQHVCGGSILDPHWILTAAHCFRKYLDVSSWKVRAGSNILGNSPSLPVAKIFIAEPNPLYPKEKDIALVKLQMPLTFSGSVRPICLPFSDEVLVPATPVWVIGWGFTEENGGKMSDMLLQASVQVIDSTRCNAEDAYEGEVTAEMLCAGTPQGGKDTCQGDSGGPLMYHSDKWQVVGIVSWGHGCGGPSTPGVYTKVTAYLNWIYNVRKSEM

SEQ ID NO: 138 - DNA, 61923 bp, Homo sapiens
cattgtgtgaggattaatttagttaaaaccagatgagatcaccgagaaatccacttcacagaccatgtgtaaacatgtcacaatatgctaaccccctcagaccctcgcagatgcgcacaacatgtgggccattgacacagggtccaagtgcagacacgaggccaacctgtacattaaatattacaaatgcaccaggtgcggtggcacgtgcctgtagtcacagctactcgggaggctgaggcaggaagatcatttgagtcctcacttgagttctgggcctcggtttgctatgctcatcaggtgtccacactaagttcagcatcaatatggtgacctcttaggagcagggggccacctggttgcctaaggtagggtgaactggcccaggtgggaaatggagcacctcaaaactcccgtgctgatcagtagtaggatcatgcctgtgaatagccactgcactccagcctgggcagcatagcgataccctgtctcttaaaaaaaaattggctgggtgcagtgactcatgcctgtaatcccagcactttgggagaccaaggcaggcggatcacctgaggtcaggagttcaagaccagcctggccaagatggtgaaaccccgtctctactaaaaatacaaaaaattagccaggtgtggtggtgcgcctatagttcaacttctcgggaggctgaggtgggagaatcgcttgaacccgggagatggaggttgcagtgagccgagatcacgccattgcactccagcttgggcaacaggagtgaaactccatctcaaaaaacaaccacaaaacaacaacaaacatatatatatatatatatatatatatatatatatatatatatatatgaaaagtttagttgttttctttgtttttagttaagaaatacacagaaatagaagtttctctattttttcgctatcccaatggtttgtcttgcataatttctgggtacaagaactctagtttaggggcttccagtacataaggtctgtgtccaaattccttacctgtgtacagatccttcaaaagaaaatgtctattgcaagagtttctcataactggagccatgtatgattcatctccccggtcccagcaccaagctgccacagaaaggatgctcagtatctgtgggtcagtcaccatttccccagcgcacacagcctcctctctggactggatgctcttcctcccattgcacccctggttttccacctgacaaagtcctgctcctccccgtaagctcaatccaaatgctccctcctcggggagggagccctccggctctgtgtgctctttcctcttagagtttgccaacaggatgacagcacgatctctgtgtcgagtctccctcccggcctgtgaaagagctgcggacagcgccttattcatctttgtgtcctcagtgtccagcacactagaggcgctcgtaaacgttggatgaaggagaggcttttacagagacgggggtgaggccaagagacagtctgggcccaaagatttcagtttcaagaactttcattctcagcctgaacccacccctctgcaggcagcctggggaatgagctggggcaaggatgaaggagggaggctgagggagggtgagccaggatggtacctgcatgtggaacctcacagcgctgtttcctgctggcctttcaggctgcagatgaaatctactgggaaaagcgagaaacccggggtagcggagtgaccttccaccacctggcggcactgtgtctgcattctcggccaccccacagaggcccagcggcatccaggagccgtggtctctccccacgcatcactccgtggccagaagcactcagtcaagccagagccaccagcattatcaatacattatcatccgtgggatttggcaaggcctaaccacgacgatctaaaagcattctctcttccaacaggttcaacccaaagaactcatttgttaacggaccaccattgactcatcaccctaatggaaaactgaatcatccccaggtcttccccccgtcagtcctctctattctgcatcagcagcatctgtgaatgccagcaccccagcatcccacactgcacctgtgctctgggtctgcctgccaagtacaggctgtgaggtatcgggccaccccctcagttccctcatctgtaagatgggaacatcaacactttgtttgcaaggttattagatatcttatatatgcacaacacagagtagaatgtcagtaaataatattcgtcttccttttcttcgtcttcatgccggtagaccaggccttaattaagatcttctccatctcttgcctgaactattggcactgtctctaaccccctctccctgcctcgcccccacactactgccagaattatcttcctctgtggcaggagttatgttttaaaccaaagtcactctaccaacatttacacacctttcgtttgccagtcactgtgctggtgccacagatataaataaaggagagatctcccagggagctcagtacaggggcttcatatatgctttagagactgttttagttagaatactgccatggcttcagcgtgtgtccccaaaagcatgtgtcggaaacttaatctccaatgaatagtgttgggaggtagggcctaaggagagggtattaggccacgagggcacagtgaatgtattattctgttatcttgggagctggttccctataaaaggatagaaagaagttcatacaaggccaggcgcggtggctcgtgcctgtaatcccaacactttggaaagccgaggcgggtggatcacctgaggtcaggagttcgagactagcctggtcaacatggcaaaaccccgtctctgctaaaaatacaaaattagccaggggtggtggcaggcacctgtaatcccagccactcgggaggttgaggcaggagaatcacacaaaccaggaaggcggaggttgcagtgagtcgagatcatgccattcaccaaggcaatacagctgggaggcaacagagctaagatttaaagctatgcacggaggtcattccaagtatatgttgttcattatccggatactgagaaaaacaaatgggataaagtaaatctataccatttactttctagccagattcttttttttccttttcttttttttgaggtggagtttcactcattgcccaggctggagtgcaatggtgcgacctcggctcactgcagcctccgcctcccgggttcaagtgattctcctgcctcgggctccccagtaactgggattacaggcacctaccaccacgcccagctaatttttgtatttttagtagagacggggtttcaccctgttggccaggctggtctcgaactcctgacctcaggtgatccatctgcctcggcctcccaaagtgcccggattacagccgtgagccaccgtgcccagcctctagacagattcttattaaaaacactgtcaaacactgtatgttcatggtctggagtttatagtgcatgtaggatggaaagcagtatgtcccagctccactgtccttcctgtgtcttctaacccttgggctgccccagggtgaaattaagagtatcctggagagacagatgaaaagaaacgggatggactcacaaataatctgaaattagttcattgcctaattaaaggggagaggactgagtgaacaggagttcactgagactgccggcaaattacacggacaatatggaaaccggaaccgaggcaaacccaggcaggactctggtgctacaggaacctgagtccttcccagaggtccccggtgggctgcagaagccagtgtaggccccctccaggatctacgcagggcccaccatgcatggtctagggcaaaaggcctaggcatcctgggttacaccgacctggatctcaaccctgcctgagcctcagtttactcccttgtgaaatggaggtaatagcagcacccacgttatagggtggctgcaaagacaaaatgagacaatgagacttctttccacaggcaaaagagcctggcacatgggagcgcacattatatggtagctatttccttaccgtgtgtggcttatttgaagaaaatgcgtcctgccattctgtcagactcatgcctgtcttcccctcacccctaccctcaagtcaggcatgtggaagggaacacctgttcatcctggcaggggccagaggaaggtcagctcccactgaacagaggtgactagggctcagggttgggatccaggtttgggattttcaattgcctcgattctttggtacagataattgaggctcaattcaaccgcctctgagactaaatgatgtcttaggagaaggactgctaagcagtagaaatcctttctagaaagctagtgaatcaacagggagcctgctttgcatcccctcacagtgagccaaggtgcctcctgttggcccctgtaaaaaagacactgggttccctccacgctgcattccagagctgcttggtatgagtgagcctgggctgttgccagctcatgcccacccactgcgcccttctctacctaatttcttggaagagatgtgaacaaatgagccagtcactgaaactgatctcaatttacttgggttcaaagggaagaaccataggctctgctggctggaaggaacctcaggggttcatctatgtcaagctccagtctctgaattcagctcacttcagaaataatagcctctacccactcctgagtgtgggaagagacctagaacagcattgctcaaactttaaggtgaattcaaatcacctggggatcttggaatgcagactctgactgaataagagtggggcgtgctgagattctgcacttctaaccagcttccagcactggtggcattgctgggtccatgggcacacataccttgagcaggaaggatctacagggcttgctgccctcagaagctcctagaagggaagggcagtatatgggcagactgagctcttcaaggcaggagatattttatttttcccaaccacagtgtctaaccacattgtctgatatcatcatagaaaatacttgctggctggctggatggatgggtggatggatggccaggcacatatagacagatgagtgggtgactgctgatactgagatcaaatgcacaatcagaaacaactggcagccaggcaccgtggctcacacctgtaatcccagcactttgggaggccaaggtgggtggagcacctgaggtcagcagttcgagatcagcctggccaacacggcaaaacccgtctctactaaaagaaaaaagttagctgggtgtgatggcagagacctgtaatcccagctactccggaggctgaggcaggagaattgcttgagcctgggaggcagaggttgcagtgagcggagatcgtgacattgcactccaacctgggtgacagagctagactccgtcctcaaaaagaaacaactggcaattgatatatcatcctacaaattactgtagctaagcaaaaatatctaggggaaaaatgaaggcaggaagaaagaaggaaatcaggcagggaggagaggaaggaggaagggagcagagagagctgtaaaaatgaaaaaaggtttccaaacccccaagtgttctctttttatctctactagaacatctttttaagcttactgtgatgtgtggatgtctcctgtctccttcagtagactgtagggtgtttgtattcagagcctgtgttttatctcctaatccacagtgcctaacacaagaggtaggcctagcatgagctccataaacacacattttgtgaaatgaatggggataacagtgccatttacaacatctctcttaggcaccaaacacttcacatggaagtgaaggtcttgtgttgtcgttgttgtttttgagacggagtctcgctctgtcacccaggctggagtgcagtggcaagatcttgggtcactgcaacctccacctgggttcaagcgattctcctgcctcaacctcctgagtagctgggattacaggcaccctccaccacgcccggctaatttttttggtatttttagtagagtagtttggtatttttaatagaggttttgccatgttggccaggctggtctcaaactcctgacctcaagtgatccacctgccttgacctcccaaagtgctgggaatacaggcatgagccactgcgcccagccaggattatctcttaatcttcataacaaccctatgaggtcagaagtattgttatccccactttacagatgaagaagatggcgtgcaagaggattaaataagatgcccatggttacgcaaatcattagtggctgagattaggaggcaggaccccaggccactagagctcaagctcttgaccagggaggattcaggttttgagaggcctgaagcttatgcattttgaggggcttggtttttttcaaaaagcaacagactctttaatgtggtttaaaatacatccagatcaagtccccggctgttgtgaatgccgaaaagagacaaaaaagctgccggtgcagcttcaaacaagtctgagcgtcaggctggcccataaggaaagcagttgcagggacaggaggcagccccctcctccaggaagggcaacaggagcagccgggtgcctgcctgtccctggggtgaccgcctctgtgctgtgcaaggcgggagggctgtggcaataggccttggacctcccccatggacaccagcgagttcccctggcctctgggtcagccctcagcagcgccgccatgatggggtggaggagggttaaataaccatctttacagaaataatattctcctgcagaacgtgtctgagctcagaccattgtccagaaacctcatagaaaacaaacaacaaagttttttaaagtgctgctgacacctctcagaatctggtgtgcatagagctctcagctggacgagacctgttggtccttaaactgaggtcacctgtatgggaccagcctgggtgaggaaggctctggccttcactcacagggataggccacttcttgaggggctttcttgaagaaaaagcacgtcaaagaaatattcagcaaaatttacaaaaacgtatgattgtgtgaacatattgccgggccctttcccagggccctggaaggaaccgtgcaagtgaggggctctgaagcttcagcttcaggagtttcatgataactctgcctcggatcttgacacacatgctggaaacagataaggaaagggaagaaggaagagaaaaaaatgtcaaaaataaagaggaagagataaaagagaagtaatgggagggaaagaagagaggaaaaacaggaggaggatctaaagagatggatgggcaagagaaagaagcaggcaggacagggctgagggagagctgaggcttcctccgggagaatgggggttctgggccgggtgcggtggctcacacttgtagtcccagcactttgggaaaccagagcgagtggatcgcttgagctcaggggtttgagaccagccttgtcaacatggtgaaaccctgtatctacaaaaaatacaaaaataagccaggcatagtggctcacacctgtaatcccagctacttgggggactgaggcgggggaatcccttgagctcaggaggtggaggttacagtgagctgaggctgcaccactgcactccagcctgggcaacagagggggaccctgtctcagaaaaaaaaaaaaaaaaagaatgtgggttctggtccagctggttttccctggcacctgggagaggtgggcctctgttgtctccaggccactgtgcctccctctgtaaaccttcacccccacctgcaggcatcacagccaccctgcccagtcctgcttatgtgccttcttcccggacctctccacaaactcccagacccaaatgggagcagaagccaggagggctgagtcatcatccctccaaccagccatgcccagcagccttcatgcccagacagctgcctctttcctggttcatcacctgagcaccaggtaaagcaatgcaaacctgtgggccagatgtttagcctggcacatagaggaaccaagacaactgaaaacgtggctcccagtggcccactggcttctcactgccctgctgctggggaggtgcctgcctggaccatcacggccctgaccctgaggtcacctgagatcacaggctcttgcctctgcccaagacttccaactctcaaggccaccagccatcagtaaggaagggctggggctgtgctggctccagagccctgcaggccagcttcagatctctgctgctcagagacaagtccaaggccacactgcattcatcagctgagatttggccaataatccattacacagatccggtattcctcctgctcagacatcactggggtcctccatgggccatattatcccaaaccatgaacctggggctttcaaacacttgtgttccattcagcctgttcacaagcctggcagtgtgaaccagtaagagaaccaggttccagccccaactctgcccgaaactacttcatgtccataggctatagtttcctcagctgacaaatgggaacaaaatattggggttgttgttggagaattaaagggctgatacacagaagcatgttatcaacagaaggacaaatacacacgtctaacccaggctggtctcctgggagggtcaggtctgagaaatggaaggagatctggattcatatggaaccagacactaattcattatgtgactttgggtcattgactttgcctctctggaatttagttttgtcgcccacagaatgggggaacaatgtggacaattatccaagtctctcccagcaaaatatctgtggctgtaaggtttcaccttgcacatcccctggccaggggggcagctccagctatcaggatgtggcagaacgtgaatcagaaacgatcctgtggggctgggtgcggtggctcgcgccataatcacagcactttgggaggctgaggcaggtggatcagttgaagccaggtgtttgagaccagcctggccaacatggcaaaaccccatctctactaaaaatacaaattagccaggcatggtggcgcacaacacctgtaatcccagcagctacttgggaggctgaggcaggagaatcacttgaacctgggaggtggaggttgcagtgagccaagatcgcgccactgcactccagcctgggcaacagagactctgtctcaaaataaaataaaatacaaaaacacaaaacttagctgggtgtggtggcaggtggctgtagtcccagctactcgagaggctggagcacgagaattgcttgaacctaggaggcggaggttgcagtgagctgagattgcgcccctgcactccagcctgggggacagagagagaccctgtcttaaaaaaagaaaagaaaaaaagaaagaaagaaagaaggaaatgactccgtggacgaggagacgtgggctctagccagagcaccaatagtgattttcagaatattgaacggctgctgaggcaggggcaggaagcactagtacattggctctgtgcaggacagcttcacttctgggatccagggaaagggggtacatcttacctccctaagagaagaaactccctccttctctgtggactttccaatcctattgctccacacctggcaatgatctctttgtactgagctgcaaaccctgtcgcccaacccccagaccactccaacttcccacaaccccaaaccaaagcacccacacagtgagaagtcatgcacctagaaggtagggggagggggggcggaaacttctggcatcaccctcagccaacacccagttgggtggaagtcattcaggcgggaaggcttttgttacgccttaggtgtgtcacctgttctgaggccgaaggtcccatgaatgacttcaggtgttgttccagcccctaagataggtgtcaggttacaagacacataatcattccagtttggcaacttcacttgtagggctgttttaatcaagctgcccaaagtcccccaatcactcctggaatacacagagagaggcagcagcttgctcagcggacaaggatgctgggcgtgagggaccaaggcctgccctgcactcgggcctcctccagccagtgctgaccagggacttctgacctgctggccagccaggacctgtgtggggaggccctcctgctgccttggggtgacaatctcagctccaggctacagggagaccgggaggatcacagagccagcatggtgagtgtggggccctctgctcccaagacacaggaagggtgggtctccccatgtaaggcccttcaagcagcctgagcatccatcagctgagaattctgtgacaccttctaggttaaaaaaagaggccacacccaaatcccctcacaccccagcccggtacacgtctcatacccacctgccttcctctcttcctccattgccatggtccttggaccagctcacctaagaagctgagcacagagccagggctgtccttcccgactattctttcctgaatcctgcatgttcttttgcccaatgtctccaggtctgttggttagaggttggcactatttttccaaggcagggggctgttctgatgccacggttgccctctgccactccctggggaaactgattccttttctttttaaagaaaagtgtagactgggtgcagtggctcacgcctgtagtcccagcactttgcgaggctgaggcagacagatctctcgaggtcaggagtttgagaccagcctggccagtatggtgaaaccccatccgtactaaaaatacaaaaaattagccaggcgtggtggcaggtgcctgtaatcccagctacttgggaggctgaggcaggagaatcgcttgaacttgggaggcggaggttgtggtgagccaagattgtgccattgcactccaacctgggcaacaagagtgaaactccgtctcaaaaaaaaaaaaaaaaaaaaagaaagaaagaaaagaaaagaaaacagtgcagagatgcctccaaacaatctagggtgtttgtggtcatcttttacttggtctcttttcatgccctcaccctctctcctcctcctctgaatacctggagcgtcttcgctgtcttggggcaaagagaatcaaccctatctttcaaggaggacagctgagggccagggaggggaagagataataactgggtctgaggaggaacccaggggtcttccttctccagtccttggccaagaggcagcaattgcccagccaccaaagtgaaagggaagggaagagaggaaaggagaagccactgtccaagggggaagggtgtgacctgcaggggcccctcgagtgattgtctcctattcccaacctgagcacttcccacgacactcttctgaaaattctggcaagaacaattcttagtgcggttgtagctgatgatcagaaaggggaaggggcttccctttgagccaggatcaaagcacaagcttcctgctttcccatccaaggaggcgccccaaagtttggcctgtgtgcagagacgctgtatcccctggggctcccaggagaggagagcagctgtggagtctacctagctgtgagctgcttctgggtggcaggcactgaggagacctggggtgtctcttgggggagcaacagagaagggaatcatttctagggcaggtcactaactgcagaatcagaaggctgaggccagctccctgattagctgtgctgtcttgaggcattcatcttcccgagactcaccttctcccctgcccacggaaacgatatgacccacaacagccccacgcacatgcaccgggttcgcagagattacacagctaatacatgtgagtaggttctggaaaccatgaagccccgcacagatgtaaggacttaggactaaagaggagtctgtgctaggaaatgacagctgggtagtacacccaacacagaccctttgccaccagggaaggagctgggcattgctggaggagcgggggagggcaggtgggaacactggtggaggggtcaggtcaggcctggggccccaaaggcaaggcagcagcatggccaatctccacggtgtggtcaaggaagtttctagccccggagctagccattatactgcctgtgctgaataaccctgtcattaagcctgtgcttaataacccttgacagccatagctcccagccctgaggggaggatgggatctccacacccaggctcagccctcccttcccttcccttccattccctacctccttccatccccacaggcccctttctgtgacagtcagggtcctttgagctgctgcgtcttaatgacagctctcccaagaacccattaagctgggtattcctagggagagctggagcagggactcaggcccaggcagaggtcagagcccaagccctgtccccgaaggaaatgtgtcccatgctaactactccatagctgaggcctggagggaagtcagggaccctgggactggttatcctggccttgactcattactgttccggagacctaaacgcaccctgagccaccagacgtgggtgttaacacctgaggtcaaccccctgacgcttccggctgctctggaggaagctggtcctccctcccacctcctgttttccgtgccagcctggtacagagtcaaggggcttggctgggcttggctgggctcagaaacgtggcagtcaggagccagcctgcgggcagcggggtgctgggagcactgcagggtccaccctgactggggcacagaatccagaagcccactcggccctggcagtgccatcctaggctctgaggtggtaaactgagctgggcagtgggaaggtcctaaagggcaagacaggcaaggaggggctgcttgctttgcctgctctcctggatcctttgccacctgggtgacagggcctggtgtcactgtaaccactccccccccaccaaaagaagctccagccagacaccatttaatcagcccctttcattggccagcctctaaatggggccggggattgggaggacccaatacctaggtttcaccctgcaggtgctcaacacagagtgtgacaagtataacaccagcagtggttacaaggtacccctggagctgaaaaagcaatagattctctctagggaagtcgggaaattgtcctggaagagaaactatttgcattggactctgaaggatgggcaggctctctccaggcagggaaagcaggaaggagctccagacacaggggactgcatgtgtgaacagcaagaaagagtggtagtatagggacaacaggctctcgctgtggctggagcaaagactccggcactccaggtcatgggagctgcacctgccgaggtggaagctgcatccccaggccctgtccatctcccagggcgcttccagcctgaccctgggggtcaagctctgtgcctgggtgcttccctggagaaggggttcagatgtcagggctcctgcgtgaccccaggcctctctcctcctctcagtcttccctcagtgcagctgagaacccagcagccacctccctagcccagacccatgccaaagcccaagagatctgaggagctgaatgtaagaaatgaggagagaccagctcaagggggtcatgggtagagggagagatgagaaaaacagacccaaaacagagctggggaactgccgacaagcttcccaaagccccagaaacgccccagggcagcaggagacaaatgctttcaggcctgaaaatctccacggcctcagacttcccaggtgcctcttctgccctcagtcttccttcctgctcaggtgaaaacatcagcctcagtaaaacgcttcaagttcccaagcaaggattccctgggacagtgaactcctccaaacctaaagtgcaatcatctaccacattttcttttaaacctgttgccaccagaatgggagcttcttgaggacagggtctgtgtcttttctgcttttagccgcaaacctagcacagggcatggcatccatggcatggactaggcacttagtaaatgtgaatgaatgaatgagtggattgatggatgacaggtaaataatcaaagacagaatcccctataaccaatttctgatttatctgacactgaaaacaaggctcacccgaagtccaattggaaaacataccagatctatctgaggggttactaaagtgtttttatcccagagggggatgggcatgagggaggcacaggtctgagcctgcccggaaaccctggtgatagggaaggggaagagtggggcagagccaatgtggcaatccccctgtgacacgtctaacgccacctcccagcctgccactctgactaaccagcacgtcggcagctgagaaatgtgtaaacaagatggaaaaccgcaacagtcctcccctgcccgtggcccccagagcaccctccagcttcctcgcataatccacgtgcaaccagaaactctcgaagggtagcagatgaaaggaacacttgaggaagagggtgagagacatgatggcccctgtccaggcgtgcgcacctgtccaggggtggcagtcgcgtctcctgtcacaaaatgtcctgcacatcagtctggctgggcgtcgcccgctggtgcggttgagccaaccaatgctttcagcatatcctgctgtctcagtttcttcctctaaatctgtatgcattcattcattcattcattcagcatgtgttccctgagcatctactatgtgctaggtactggcaagataccatggaagattcagagaatatgtaaaatctaggccttcagttttgtgcactccatagatggaacaggagcaggggagactgctttcccacactccagacaaagcctgacactcactcactcactgatgtccacaagaaggggctaaacatagagccaaggtcagccccctcaccttcatcccatctccaccctgacatcactcacgatcacatctccagtctccagagaggagggtcttgccaggctgctgggagaacctgtccggacacgtaggagtcactggtggtcttaaagagaataatagctacagcggcagtatcacatctctatccaaatgcaacaagggccccatgttgtgctttgagaagcactttcacatccaaaatctcccttcagtctaatacaactctctgagacattgtaatcctcattctacagatgaagaaattgaggctcagccgggtgtggtggctcatgcctgtaatcccagcactttgggaggcctaggtgggcggatcacctgaggtcagaagttcaagaccagcctggccaacatggtgaaaccccatctctactaaagatataaacattagccgagcgcagtagctcacgcctgtaatcccagcgactcgggaagctgaggcatgagaatcgcttgaacccaggaggcagaggttgcagtaagccgagatcacaccactgcactccagcctgggcaatagagtgagactcggtctcaaaaaaaaagaaagaaagaaagaaagaaattgaggctcaaagaggttcatgacttgaaaagggtcattcagccaagggcaaagggaaaaccagtagctataattaacttagactttcaagaagactaaactaaagtttcatacccaatgctgctcagggaaaaaaaaacccaaattaccaggagaccattaacgatagaaaattgatttaaagagagaatattataagtggatcaggcctaggactaatcctatctgtgggaggagacaagagaaatttcaggctgagagtgagctcttcagaatcacagaccctaaggaaaaaccttagaggtcttctcggcgagtgggttccccaagcgtactttgacctcagagcctttagctccactgaaatcaaatgcagaatcctcgtatgggacacagagagaaaaacagagctgcagtgtttgaaaggactgtcccccacccccgccacttctgccctgcctccctctcctctgctgcgccgctgcggggctcggtcgaatcccccaggggtgctcagagcccttatctgaccctggccctcgtctgccacagaaaccttcacaatccagcttttgctcacacatctgtttctagaagctacggttgctgaaaacaatctttcctttgccaggagaaaagactttctgtaacttcccccgttcctcctagaactgtcttttgcctttctcagacggccacacacacttgaagctttcatgcttccactggtccttgcttctctgaactgcgtgttccaccctctcttccgagagagttcacgcaggtcacacgacatcacctccggtcccaactgccctggtcactgtccccagatgcgcttagtccacagagtcccctgctgaagccaagccccggggcccatgaaatcataaaagtcgctctttgctcagttcctattacatacatgacaggccctctatgaagctccttcccattaacaataaataatttttgactatgagtatctactatgtcatgaacttcccaggttctattttaatattgttattaataactaataaaaataacagaatatactccatgggcaaaagagctttacctctggttcactgctaggtctccagggcccagaaagttgccttactaaatgagtaaactattattgttgttgttattattattacagttaacaattactgtactcttggctgggtgcagtggctcacacctgtaatcccgctttgggaggccgaaaagggcagatcacatgaggtcaggagttcaagaccagcctggccaacatggtgaaagtacaaaaaattagctgggcggtggtggcagacgcctgtaatcccagctactctggaggctgagccaggagaatcgcttttacctgggaggtggtggttgcagtgagccgagacagcgccactgcactccagcctgggcaacagagcgagactccatctcaaaaacaaaacaaaaaaacaattatcgtactcttaccgtgcaccaggcaatgtactatatgctatgcatatctggggctccttaggagggagacttactgcatctctctttctctctctccctctttttcacacacacatgaaactgagtttcttggtggttcaataacttgctaaagcctcaggccaatgagcaaacaggattcagacctaggctgcaggattccacggcctgtgctctgtgcactgtaaaacacaacctctcctagcaaatgtaatttcagcaaggaaaaacttcatgaagcactcgacgagttatgtgagtgggcaggaaagcagtaaaggaacttcaggttatgcaactgcaaagtcagagaggcagagaagacactgaagcactattaaagcactatttataggatcctgagctcagagttcacaggaaacagatctaggagtcactgaaacctgtgccaggagattggctgcagcagccacaccagcccagcaaggctggttatcactggggcctccagaacaaacgagaatcctcaaccctgcccctgtacagaaccacagcacagaccctccttgaacatgtgtggagttctgctctccatgcctgtagggtaattggggcagagagcactaattttcacttactaaactcctctatgtttcaagcaccaagccaggcacatcacatgtgtcatcaataattctcaccaacaaccctgtgaattaagtcatattctccccattttacagatgagaaaactgagactcagaaaaatttattaacttgctcaagacttcatggctgggaagaggcagagctggattcaggccagtgtccctgcctcagagttcaggaggagcaggatcaagggacaacccccttctgatcaaggcagctgagacccctcaaactgcaaagaccaacctaggggactatgagcaagtctgtaaaatcatgcaaagaccagatggggctcctgggggcttgcaaaggtgctgaaaatgtgcacggtgctgagcaggtggcgcaccttacagaatctttctccccatcatcttgtgaagtcgcttttattgtacccacattccaaagaaggaaactgggtccaggagctgtttagtgacttgctcaaaagttgttctacagatggaggagtcagatcttcttcttcttttttttttttttgagacagagtctaacactgttgccctggctggagtacagtggcaggatcttggctcactgcaacctccgcctcccaggttcaagcgattctcctgcctcagcctcccgagtagctgggattacaggcacctgccaccacgcccagctaattttttgtatttttagtagagatggggtttcactatgttggccaggctggtctcaaactcctggctggagtcagtcccaatcagttccttttccctccctgccatttccctccctcttaaagtttaaaggacaactcaggacaagcaaaagtgagtacgattcttgaaagatggtataaactctgtctttgaacctttttaaattaacgtcagactgctccatggatggcaggtcctcagttcaggtaaattgcaaggttgagagaacccctctaagctttaaaatccatcagcccttcccaatggcaaacccatgagggtccctgccaggctgaaaggctgaactgtgtggcgggaccccttctggccctctcgagtcccctccagccattgtccaggcattgtcctcaggtgtgcaaagatggtggcaccttccttcctatcagacccttccaggaggggaaggtgggctcagatggacccaccactctggaacagagggaaagctgagcaaagtagagctgttgagagttcagaaaggtgggagagaatgggctgcttcccctaggacaaagagaaggatcgcagagggattcctaagcactgcagtaaacagcagcatcacctggaagcagggccctccagtgggaaccaggtctgtcttcagtttaatttagcccaaggggcatgtacaaatacctcactcctgcccttcacattgtctctggggaaaaagcataagcgctgtgcctcagtttctccatttgtgaaataggaatagttacatcttccctgcctccccagccctatctgaacctaagagctatgcccgaacacaaaagctgattcttaaatgatgggagctgaacagcaggctggcaggggataatggcaggctgcctgactcctcccttctgccccaggccctgccctggagccattatgtgctgagatgggggatgaggtgctcggctcaaattgccaataggtcagcacctatgtggtttagaacaaggcaaaatggtttctaatgtagcagccaaggctgaggttagacccaaaggaaaaagtgctgctctaataatgactcaacgcaaggcagtgtttgtgaggatgctccctgaatttctgcgtgagagcttagatgcccagtggcatatggcctgggctggtggccgacctgcctagagacagagtaacaggtgcgatcccaggatacttggaagtcggcatgatcagtcatctctgaggacctcccatgcactctgggctgctgcatcaccaccaggctcatctcaggaaactcactccctcctctcctgccccatgatcttccagccctcagtgaccctctccttacctgtcatggctgagacatccaagagagagagccctgttgccagcgcagcaaaggcatcaaactgcctattccagctgcaagtggagaggacacagctgcttgccgttggttttggggagggatgcaggttctggggtcagagagcagagtgaggctccctcagagcagcactgtggccgggccccactctgcaagctgacggcaagcacctctgggtctcttggcttacccgaagaactttccccaccccctcccttgggttttccccactgcttattactggcctcagcaacctaactgccacctgcccaagcctcaaaggacctgtttatcccatcacctagcaacagcaccatctctggctctaggttttcctatgagaccatgggaagccagggccttggactccagggaagactgaagctgtcaccctcttttgtgtgcccctgcttttctctctttgtccacactccagtcattccagctctgcccttactgacttctttccagagcaagtcaatgccaagtcagcattgcagagaggaagagagaaatcaggccccagggacaggatgcttggcaagggaggcagacaggagctggccgagctttctgttcctttggcctccttgagctgccgcctcttcttcctctccttattagcctggtggacttgcctgtttcattatgaggttattaactctttcatcccatctctgaagggcagttcccaattacccaaagggatcttgaggttcagagacattgaggagtgtgcccaaagccacacagcaagtcagaagacaaggcaagatgagaactcatactctccaggctggtggcttctctgcagcacactttgtggcttctctgcagccacttaagcttcactccatttaaaaacaagagctgccttgtatctgggttcattctctctgagctggaaaggaagttgaccttaagatgtctgtttgctttttggagctgagctaagcccaaccaggaggttccccatgatctaaaacagtggtaggggtggggaataggaataaaggaagaagaggcaggtgagaaaggtgggaacttatggaagaaagggaagaacaaatgctaatatcaataaagcccctcctgggaaccaagccctgcaataggcccctttcccaacatgctctttgaggtctcttgaccgcattcatggatgatatggcagagcccagaactgagcaaagtcactctaccttcacaccgaggaagagctggagagatgctgggggcaatctctgcatgatgactgcatgctggttatatccaacaaggctgcattgcaagggaggagtgattcaaaaggacccagcaccagctaatgactgttaccgaaatgagttcctgaaaccatggggaaatgaaatcaacagtccaccaagtccagaaacccggcccaaagggctagatctgttccttacttgctccgaagccatagcagctgccttttctgtaaaatggggacaatttctcagggttgttccatggattatataggacagcatttatgaaagaaagacatcgtaaattatataataatactcaactgcaataactaatggttctgcctccatatttgggtcttggattaatgtcttcctgctgccggtgacaaaccgagaagcaggaaaagaagattctctgagttgatcaggcaatggcaggttttccagtgattgaacacccacccacttccacctccccacctcacccgctacctgggccctgggggcctgggcattcttgcccttccactgtactgcacacagcaggagcttcattcccggatgagccccaggtcagacactggctgggctggacccatgagtcagggctctgcggcagactgaatcaacagagaagacaggcctggcccagccagtggcccaaacagaaagggaaaggccaatgcctttgcttggtctgggctgggccggggctgtaacagttgtaggcagaagctgagttcaagctgggggtaaataaatacatctccagcaaagcagaaggaagcacatgtgttgtttggtgacctctcaacttcctccttccctctattaactccaggttaagacaattctatccgacctctgttttctcatctgaaaataaggaagttgccttgtttcagctttgcatcttctgatcatggcggggacccaccatggtgatggggtctggctggatctctgaattttacctggtacccacatctctcagacccattctctcctttccttagctcaggattgttgcttctgggctcagaggagatgcagctggccataagtccctatttctatcctgctcagggatgtcatcgacattgatggcccccagttgacactcacaggcctaaaatgcacctacctccctgcccatgagccccagtactcgtgaccttctgcagctcctcttccaaaggtgtatctgtccatcagctctgacctgtctgtgtcacagatatttgccaaagagcttcaagaaaagccaaagaatgagctactcatggggaaactcaggcagcacaacagtaagggcagagcatggtgaggacatgagtttgacctcctcaagccactcagcatagccaggtgatggcttttttatgttttccttgagccttgggtgcatagcattgggggaactagaatccttgcttcatgacttttttcactattggtccatgcagggcccatttgtaacttgctagttagttggatttaacaatgtaataagcctccataaacccatcatccccaacaaaagctggacttaatagtaacctacatctaaccatgaggttcccactcctgcacacacatatccatccctctcctgaggtgggtagagcaagtgtctttcgtttattaattcgacaaatattggctatacatatttgataggcagggactgtactacaagctccctgcccaagtaagttcttcccaaaccccatattcatcattcccttgcttctctatagaaaagattctgtgctatatgtaatcttttgggactaagtttttcccttaatattacattctaatatcatccttattattattttgagatggagtgttgctctgtcccccaggctggagtgctgtggcaccatctcactcactgcaacctcccctcccgggttcaagggattctcctgcctcagccttctgagtagctgggattacaggcgcgtgccaccacacctggctaatctttgtatttttagtagagacagggtttcaccatgttggccaggctggtctcgaactcctgacgtcagatccacccgcctcagcctcccaaagtgctgggattacaggtgtaagccaccgtacctggccccatccatattattttgtgtcactacagttcatttgttttgactgcagcctaatatgtcactgtgtgaatataccagtcaggttcgtaaagactgagctgaggctgagtcctcaaactgagatattttcattaattctttcattcaacaaatattttttcaatactcattatgtactgtgcattgtaggagacatcagggatatcacagttaacaagatagtcacagtccctgtcattctagcttacggttttgctttagtttattttttctttctctcttttggtttcaaacagggatagaatttttttccacaactactactcagtgaatagcaattgaaaacatattaagagccaggcattgtggctcacacctgtaatcccagaactttgggaggctgcggtgggcagatcatttgagtccaggagttcgagaccagcctgggcaatagagtgatacctcatctctacgaaaaaaaaaaaaaaaatagctgggcgtgatggtgcatgcctgtagtcccagctactcaggagactgaggtgggaggagcccttgagcgcaggaggtggaggctgcagtgagctgaaatcacaacattgcacttcagcctgggcgacagaatgagactctgtctctctctctttcttctctctcactctgtcacacacacacacacaaacacacacacacacacacacacacacaaaattagccactgttcagttcagtgatgaggaatccaaggccccagaaagtgcagaatataagcctcctttgtgcctcagcttctagcactattccgggtccatcaaagttgtatagtcaatatttgttaaattaacaataaacaaaagaaacttgccctacctacctcaatgaatgcaggcatgcatgcacaggtagactcagtggaaaagaatgaattgacaggaaagggcccacttccctgctccaccaaccactcttatagcctcccacagctcagcaagcaccctctcacccacgtaactaaaacccaagcacacccaatccatcggcgaggcctattgtttgtatcttccaaacacatttggcgtctttttaccaccaacctcctctctccttatgcccttgccttgctccagccatgcccatctctattcagttcctccaaccccccaagcttgttccttcccacttggctccttcttgtcacctcctctagggagaccagcaagatcctccgtaaccatcctgagcccctccctagagctcccattctcagtctgcatccaggcgctgtctcctctcaccctggattactccctgcatagcacctacccctctctgatcttttctggtttatctgtttatggcctgtcctcccccttcccctagccctcctctccaccaagaaacaagcttcttggggacagaccctcggctgtcttctttgggcactattttccccatcttgctgggatgatttcttgatctgtctttgaatcctcctggagtagtgcctggtacaatgtagatgctttacaagcatttgtttagtttaataattaattctttaatgctgcccatcctggttggcagacaattgatatcgacttgactagacaagagttagatgaaaggactttgtaaactgttacatgccagttgggtgtgaattactgttgacgttatcctaacttgactctagctgcaacaatgcagagtcgtccgattgggtctcatcttcagcctggaaagagtctgctctatccagccctggtgatggtggaggagagacggccgggaatgaactacaatgcagagctcaaagttcagtccagttcacagtcatttattaagtttttactaggtactagcctggtgctaaacagcaagggtacaaaggcaatgagaaagagtggctaattaaaaataaaatgttaaatttaaaaaagcaaccaaaaagaaagaaaaaaggaaaggaaacgctgaccaccctatgagagaagccctgtgataaacacctgtaccaaatgctacagaagtgcagaggatggtgtaaccgcccaaggggttcaccttgcccgctgcctagacaaaaccaattcatcaagacaggggaattgaaatagagaaagagtaattcacgcagagccagctgtgtgggagactggagttttattagtactcaaatcaatctccccaagcattcagggagcagagtttttaaggataacttggtgggtggggggaagccagtgagccaggaatgctgattggtcagggatgaaatcatatagagttggagctgtcttcttgcgctcagtcagttcctgggcgggggccgccagatcagatgaggcagtttattgatctgggtggtgccagctgatccgtcaggtgcagggtctgcaaaatatctcaagccctgatcttagaagcagtttggggagggtcagaatcttgtaacctccagctgcatgactcctaaaccataatttctaatcttggggctaacgttagtctagtccccagacaagaaggcagtctgctctgggaaagagctgttaccaactttgtttaaactataaactaagtttctcccaaagttagttctgcctacccctaggaatgaacaaggacagtttggaggttagaagcaagatggagtcgctaagttagatctctttcactgtctcagtcatcattttgccaaggcagtttcaatgggagggcagaggaaagagagttcccatgtgagagcccagcatttcccaccagacaactcatgtaatcctcacagtagtcttttgaagcaggttttattgtccccactctacagagggtaagcctggagctcagagaggtgaaggatctttcctgaaagcacacagttaataggaggccggtcttgtattctgactcgacccctgcagactgcagaaccaggctgtgtgctacatcacaaggccacccatggcctagtgttacccaagggcaaggccaggcatgtccctccatcagactacaggctcgtttgggagggaacgaaagagctccttcctattgctgtgtccaccgtgcttagccgtggagcaagcaacacccagggaccctccctccatatctaatctgggtcacccactcagggattaaaagaggccctctcactcccaagaggaacagaaaaaatttccagccagaaatgtacaaggtcctgtgactccttcaaccaccaccaaggtgggtcatgacctcagcacaatagggcaggcgagtccctgggtggagacctagaccacagggttcagagggcataaacccagacagcatgctccttttaacctttgcctggcagaaagggcctgcatttttttgtatgtgagcctttgtgtcagtggctcctccatgtgactctgtggctgtgtgcgtgctgagtgcacacatgaagtggtgtaaatagaaatgcctttgcgtgtatttgtgcacatgcgtcgacggcagcctaagaccactctctcagaaatatcataatgttgatagcacatatgtagtaaagtactcaagtctaaagtctaccacccagtgaatttttgcacatataaacacctatgtaaccaatgttgaaaacaagatccagaagttttcctatgttccagaagactccactgtgttccttccaataactaactgccccccccaatggtaaccactattctgacttctatcactatagattaaccttgccttttaaactttatataagtgaaatcgtactttttgtgactattttcttcccttcatcattatgtccatggaattcatccatgtcattgcactgagaatgtttattcttgtctattgctgaattatattctattatatgaaaataccagtttatccactctaccagtgactgacgtttgggtttttccaatgtttagctattactaatgaagcgactataaactttcacacacaggttttttgctggacatttgtactcatttctcttggctctatcctggagcagaattgctgggtcagagaatcataaaatagttgtacgtttagcattagtggattcagccaaaccattttccaaagtatttgtaccactttacactcccaccaacaaggtctgagaggtcttgttgctccacatcatcatcaacacagtattattagtcttttaaattttagccatttagtatttatgtagagaaattttattgtggtttgaatttgcatttgcctgataagtaatgatattaagcattgtttggtacttattggccagttgagtattcctttttgtaagatgtctattcagagtttttacagaaatatagtatctgtaaacatagacaaattattgacaaaaacagatagtagagcagaatcatcttgaggaattcagcaatttacacaaaaaccagcagccagttgcttctacaattgctaaccagttgctactagttaagtaaactaataagtaaactaattgaaacagatcaaacaggtgcatgactgaatgtttcctgttgaaccaggtatttggataacacagagacccccaacgtagactcagggagaagggaatgtagacaagacccaagaacctcccgtaggctgctagccccagcctgagaggctccctgcctcaactcactgactgtttttccttcaattacaggatcctgacagtgatcaacctctgaacagcctcggtaagttcaggtccggctttcattcgtccaccttagcctctgagtttcagctaccaagtagatcctaagccactcgcgcctggccctcaccaccaccaccaaagtgctaagtgccatgagtgacatccagtcacccgtccatccatcactcagcaaacattccaggattcattccagaagtaggaggcctggactctggggaaacaggaccaacaaacctaaaatccccaaagcaatgattctccaattcattcattcagtcactcttatcctttcagtaaaactgtacgtacctgccatgtgccaggccctaggctggatgctgggctataacactaattaagacagctgaagtccctggtgtcatggagttcacattggccagaggcattttcatgaaaaatggcagtgcttgcctgatttccaagggaagaaaactaagttaataaatagaatgatcccaaatttaaggaggtatttttcttccattacattttcttaaaccattaatatctactcctgatagcctgctggatcagcaaaacaaatgagcaaggaacacgttaatatgaacagatcagtaagaaaatggccaatcctgcttgacaggctatttatttctcagttctgggtcatgagttaataatgaccacaaatgaagtaatctttagcaagtaaaatggtgcctagtttatactttggaattcaatataagagtaggccatggtgtccccaaggaacaccagggtgccaactgctccgccacctgagcaagcctgagaactctcaaaccagaaaacaagctgaatttgctcgaggaccagggagtgaacgtgactatgcagaactggggttggtgaagactagcagtggaagtccatttggctcagagaaagaggccaaattacactggctttgaaagatataatccagatgtggaagtctcttgtaggccctcgagtaagaagtgacaggatgaaagcaagcttttaggaagctctgtctagctgcagtgggcaggacaggctggagggaggaacaacagccggcaaggaggctgttcatagctcactgggttcgttaacttaaactaggtatgaaagctcgttccttcctgatgggggaagcagatgctccctgagaatgtctggtcttggacacaggaacccatggctccccatgggtcactcactcttggagaaaacaaacaaatctcatgttcccagaggtagatgctcaataaataaatcatgcatgaattcatgaacaaaatgtcatcatggccatggccacaggaaagaggacaattctgaagactggctgctggaactttaaaaacagtattggcaaacattactgataagctactttgtgccaggtcatagttcacaggcaataccattccagtccacatccccactgcgtggcctctgtgtctgaagttaaaacattcttttggggaaacacaaagtgtcctaagctttcctttgttaacagattcattaatactagcattcattgggcgccaatctctagcaggatgccattctccactttggaagagctgaggaaagaaatagagtcagacatatgattagccatcattcaaggcagaataaaatgtgacctgtaagaaaggtagaaggggccgggcatggtggcttatgccagtaatcctagaactttgggaggccaaggtgggggtggatcacttgagcccaggagtttgagacctgtctgggtaacatggcaaaaccccatctctacaaaaaataccaacgttaactgggtgttgtggcacatgcctgtagtcccagctacttgggaggataaggtaaaaggatggcttgagcccaggaggtggaagttgcagtgaaccaagatcatgccactgccactgcactccagcctgggcagcagattccatgaatgaaagggagagagagaggagagaaaaaagaaagaaagagagaaagaaagaaggaaagaaggaaagaaagaaagaaagaaagaaagaaagaaagaaagaaagaaagaaagaaagaaagaaagaaagggagagagaaaggaaagaaagaaagagaaagaaagaaaggaaggaaagaaagaaaggaaagaaagaaagaaagaaagaaagaaagaaagaaagaaagaaagaaagaaagaaagaaagaaagaaaaggaaagaaaggaaaggaaaggaaaggaaaggaggtagtagaagggacgtacttaagagagcagagccaagaacaattcatctgttcaggtgacaaatatttgttgagcaattgctgtggaccaagcactgttctaggcaccagggacttagcagtgaacaaaacagacaagttctgtcttcaacgagtcttcatttcatggaggggcgggaggagacagaaaatatacaaaataagtcaaatatagagtttgttagaggtgatgcgtgctttggaagaaaaaaaaagcaagaaaggaggataggaaaggttggaaggctgcattttaaatagggagatccaggaaggcctcactgtgaaggtgacagtgaagaaagactgggaggaggacagggagccagtcatgtggaggtgagggtaggagagccggtccgttgctttccagggtttccagaattcttgccccatctcccccagggcagaagtccccatggcacctccccagcttatttcccacaaggagtgggggacttaaaagaatgtatctctgatacttactgatattaactttgcctatgttttccctttcccaggttccttctccttggataaccatgtgcaattgacaatgtagttattatcacctctgttctaggcagtgataagctcctacctggtctccctaaccccagactcttttgttccaatccacctcctccctgatgaaagatccatctttctttttgttttttgaggtggagtcttgctcttgtcgcccaggctgtagtacaatggcacaatctcagctcactgcaacctccgtctcctgggttcaagtgattctcctgcctccgtcttccaagtagctgggattacaggcatgcaccaccatgctggctaatttttgtatgtttagtagagacagggtttcaccatgttggccaggctggtcttgaactcctgacctcaggtgatccacccacctcggcctcccaaagtgctgggattacaggcgtgagccaccgcactggaccagatccatcttcctaaaattaatttgatcctgtctctccactgttcaaaaactttcaatggctcctcactgccttcaggataaaacccaggctccttagcataatgttcaagagtctccacagctgccttcacccatcctgccttccaacttgcctttattcccctggtaccccaggcacaccaggcagcctacaggcaccctccgtgcctccgacagagctgagccagtgcctccctcccaaactgcatttaagtgccacctgctgagggaggctttcaccagcttacctttgaagatgtctctattataacatatattatcttccacctggctgggctggcatctgtgtctgcctcttcccccagatggtaatctctttaaagacaaggaccaggctagggacttgctgtttgtgggattgaggatgcattgattcacaagtatttattaagcctctactaagcacacactgtgctggaggcccctgcctccctgatgcttaatgtttaatcaaaagctaagtcaggaggtcaggaaaaggataaatggtggcacagtgaatgggtacgtgccccaggggctcaggcctctctcgggcaggcgagggtcagacaaaacccagaaatgtcctaggacaggctcaggcaagacacgggggaggtggcctgacctgggggctcctttgagcggcactcaggaaagataggtgagcctggataagtaagaagaggcagggtaaccacgtgctgttgaagctaagcctagtctgcaggaataaccccccagcattaaccaaaactgtgctcaaggcatacctgtcaccggccagaaggcaggaggctgtggagtttggctcagggatcaccaagtgctgactgcatgctcttcccctctgcctcccattttcttgcagatgtcaaacccctgcgcaaaccccgtatccccatggagaccttcagaaaggtggggatccccatcatcatagcactactgagcctggcgagtatcatcattgtggttgtcctcagtaagtgacagcccgtacccgactttcaccctctaagtaaatgacagggcccaacccccacccccgcactcacccctgaataagtgacagtcccccacccctgccctcaccccctcagtaagaggcagtcccacccctgccctcacccactcagtaagtggcagccccgcccctcccattatcacctcagtaagtggcagcccctacttgtccttcaccccctcagtaagtggcagcccccacccccacagtcaggggcaggtgatctgcataaagctttgcagaaaaaatcattggtataataaaaggaatttgaggagaaaaaaacagagagagaaaaagaaagaagagagaaagagagaaagaaagaaagaaagaaagaaaaagaaagaaagaaagaaagacatgtatccaccccctgctttgaagagagccttcttctaaaagtgaaaggggagatgaactcagcccccatctgttccagacggcttctatcccaggtgacttcttctagagggagagcacagtggcatatgttcctaacccacacatgcaatttgcagggctgccacgccccctgccccctccttcccatcttctgcagattgcaagctgagtggctctgagcagcggctggaagaacagggcgagtttctgcttgtgaggaggggagaaagaggaggcagcagggaagaccccccaggcagttggcacctggcccccttcagcttggccttcaccatggccagtacctgaggcccagtgtggtcttgagcaggcctctctgcctcaggcccttatctgtgataaagaagattcaactgaaggagcagggatgtgggtcctttttggctcccacatcctatgatggagtcgttgcctttgttatccacatgagcacagcaggttactgaccacaacttttcacagcaagaagtagggcactggggaccagactaggaatcaggacacccgagacagggattctggctctgcctcttgctgctgcgtgaccttgagtaagtccttcactgcctcataccctcagtctccgcacctgtaaaatgtccttcctccctcagagcgatatcatgagcaccagtgagataacacatgtaaaggaccaagctaaaaaccaagttttgcaaaagagtgtgtcatcacacagcagcagacaaaatgtgacccaggacatgcatttgctaattggggcaggactgcctgtgcagccagggaatagctggcctttcaggaatttgtacttgtaactgtggtgacatttccagcagtagcagccaactgcctggttagaggacactgagagagactctggtcctcattctacatgagcactgaggctcggagaggaggagtggcagtcagggacaaagctgcgacagaaccccggtcccctgattgaacaggtccatttccatctcgtggcggtggaaatgcagagccacaacataaaccccactaaaagccctgggagccctggatggtgtgagatgcagatgaccccaaaccctctctccttgaccttggttgcccacatgatggaggtttgcagtgacatcagcagacttgccatcctgttctattcaggctaatgttaaagtgagcttgctttccataagcatacaccctgccacagtggagataaaggggaccaaagttatccagcgaaagccaagcaggcactaaagcataattcagagctggacactccctgtcccagaaggtcctatgtggcttccatatcctgggcccccagattctgcaatcagaggttgttacccagtcctccatcctgggccgggttccctcaaccttatggcttctggagtctcaactggcaatgctgtctcctggatttgtcccaggaggctggagtgactctgccttaccctggctcctgattataaaccaaactccaaagagctaagtaatatctagctcctccttctcccttgcttcactcaagccaggagtgtcagggccagcagatcacatctcaagcttccccagagaattagatgggccctggctctacactggaagcactgtgtgccctgggaaaataaagcctgaccttcaattctccacgtccctgtttgtaatgtgagttagtaataacacttccctcccaagactgttatcaggattacgtgaggaaatgtatggaaagctcctgacacggtgacaagcagggaccattattagatttaacgccactactcttaagaccagcccagggtgatactggactggagagggtcccatcaggccaagacagaattcagttaggaaggaggagttccctcctgccagggtgtttggctgtgggtcttcactaaggaaaagtttgtttgtatgtctgtctgcttgtttgtttgagacaaggtcttgctctctttcccaggctagagtgtaatcgtgtgatcacctcactgcagcctcaaacttctaggctcaagcaatcctcctgcctcagcctcccaagtagctaggaccacaggggcacaccaccatgcctggctaattctttttttaatttttcgtatagacgagggtctcactatgttgccgagactgatcttgaattcctgggctcaaacaatcctcctgccttggcatcccaaagtgctgggattacaggtgtgaactaccatgcatggccagaaaaagtgttaaaatatcagttccctgaaggattaaacacactcaacatctttccatcatcccaaaatggcaaaagagcaacagaatttgaaagcagctggcagaatctaaagacggcgagcagaaacaaaacaaaaccgaggaccaaccccttcacagatctttctctttttttcttaattttagttctttttacttatatattttaattatttttttcttcaacttttattccaagttctggggtacacgtgcaggatgtgcaggtttgttacgtaggtaagcgtgtgccatggcggtttgctgcactgatcaacccttcactgaggtataaagcccagcaaccattagctatatttcctgatgctctccctcctcccgcctccccccgacaggccccagtgtgtgttgatccccctgcacgtgtccatgtgttcttaacatttaacagttctttcacccaggtaaaagcacccaattctagaactatacttgatagttacgagacattttcatgactaccatcataccacatgctctcaacagccctgcgaggcagatattatagatatcatcatcccattgtacagatgaggaaactgagaactaagaagggaaagcgatccatataaagttgcacagtaaggccgagtgcggtggctcacgcctgtaatcccagcactttgggaggccgaggcgggtggatcacctgaggtcaggaggtcgagagcagcccagccaacatggtgaaaccccgtcactactaaaaatacaaaaaattagccaagtgtggtggcatgtgcctgtaatcccagctactcaggaggctgaggcaggagactcacttaaacttgggaggcagaggctacagtgagccaagatcccgccactgcactccagcctggatgacagagtgagactcggtctcaaaaaaaagaaaaaagttaagttccacagtgggtggcagggctaggactcagaactgggtcttcagactccgggttcctcctcttttaccagtacatactgagcgagcactggagggtaagaggcagttaccagcctgtttctcccacacacgtgacctctcttgactccgcagacatcttgtgggggtggggccggtgttactatctccactttacagacaaggaagctgaggctcaggcccaagtctgtgtgctaccaagtagcaaaactgagcctggaactcacacatgcgtgtctgagagcccagcactatcgccaggaaaacccagcgtctccctgctcaagcctgaccctcagccctctctgcctctccctgcacttgccttccagtcaaggtgattctggataaatactacttcctctgcgggcagcctctccacttcatcccgaggaagcagctgtgtgacggagagctggactgtcccttgggggaggacgaggagcactgtgtcaagagcttccccgaagggcctgcagtggcaggtgagtgcagggtctgaggcacaagagaagtgggcccagcaggaggtctgctcaggcccccacggcccactgcatagtatctgccccctacttgtcacttttcatccttgttgtataaggttctttgtttgtttgtttgttgttgttttgaggcagagtgctctgtggcccaagatggagtgcagtgtcttggtctcggctcactgcaacctctgcctcccagtttcaagtgattcttctgcctcagcctcatgagtagctgggattacaggtgccagccaccacgcctggctaatttttatatttttagtagagacggggttttgccacattggtcaggctgatcttgaactcctgacctcaggtgatctgcccgcctcagcctcccaaagtgctgggattacaggcgtgagccaccgtgcccagctgtgtaagtttcttgagagcaggaccctgtcttgtctacctttaaatcctagtacttaacacacagcaaacagtaactatttgatgaccaaatgtgagccagaaaggacaggaaattgtaactgaggctgccccatgcgtgctgcgcctggtggatttcaggcagagggctagactgggtgaccttggggcattcctcctttctatgaaatttgttatttcaaggagactagaaaagagacttctcagccacttcgccagctattggtccttctattcattagtgtttgctgagacatgctatgtgacaggactgagccaggtcctttcaatggataggagatgttttgagcataaaatccacgttctctcttgggctgggctcttctaccttcttccccctggtgcttgggctctgaagaaaaaaagataggtaggagatgagtgatggggcttctgagggcagggctgagtgactttctgtgtatttgctctttctttatcagaagtcaaatgcccacaggcacctgtcatcctactgccagtaggacttctcactcaaccttcccctctgaccttacttggagaaggacttaggtccctctctcagacatttccccaggctgggcaagttgtgtggaccatggatgggtatgtggtccatacaatttaaacaagctgtatatggtcgctgggtagagtgaccacataattgatcatcaaaactgatacctgtaagagcaaaagggggcactattaaccattgggtcagggcaacaggtcaaaatggagacctaccctgggacttctggtcacactagctactgtcaaaatggggcccaaatagacaaagccaaatggaagaaattcccttgacattgaaagtgttggggctctgtggcacccccagttctaggttgggggagcttgggctggtctcatgatgagttctgagggggatgggccagttgggccccccgttccatctaactcaggttcctttcctcccagtccgcctctccaaggaccgatccacactgcaggtgctggactcggccacagggaactggttctctgcctgtttcgacaacttcacagaagctctcgctgagacagcctgtaggcagatgggctacagcaggtaaccaacctgggcctctctcctttttccctccttcctccttcctcctcttcctcctttccttcctcccttcttctctctttcctaaaaattacgggcattggagccaggcagaatggcttttgaatcccagcatttcacttataagcaacatgaagttaaatttcctaagcctcaggttcctcaggagttaattgggggaactaatgccaacctcataggatagttttgcaatgccagtgagagaatgtgtgctgccctccaacacacacacacacacttctagcgtctatgcagtcctctcctttcctttactcctcaaccttcactcctttgtgctggctttgcaagaaactgttcctgcccagtaatacaaaagctaagttaacttattcaaagtttcgttagttaagatttagcttaagtgagcctagtttcagtggggccccatcttcagcaatcccagctctctctgcaaatttcaaaagcagttccaaatctggagtggatgaaaaggtgtaagatgatagtaagagtaatttgcattctatatatttatattcacttgattttggcagaaaaccaaaaagatagttattatatcttatatatagatatatattatatctatttcataaataggctcaaacaaagtaagtaacttgctagggtactagctgggaggtagagggctagaatttgagcccaagacccctaattcttgcgcattaggagttcccacattgtttctgtttctagactgagtaattctttattctcatgtaggacatcatctctaagggaaggggctaatgagatggttgatcactcagagagtttagctggagaggatggaaaagaacccatacattcagttgcagattgagatagcctatctctggcaggcctcagatttcttcaggattctaacagactggacccagagactaggccaaacaaacaaacaaacaaaaactctactaggcagacatcaccaaccaatcacagaactctctcccatggatccctaatacagcctcaaagtccttttcagtaaatgctccaggcagccattacaaatcaatcagaattatttgcctttctcttctctgctcaacgggcttctgctgctctctactttccatagggggcaacttccattaccctctagaaagcacaccccaccaccttcatttcaaggagagtgaggaactcatgcccagcacctgctattctcccctcttcctgcagccacggagcccagcctcgctgcagccagccctgcctccccactgtagtccagtcaactgctgcatcagccgttcctggcacagcaggctgagccttgattatgaaacctgggtgtctccaggggttcttaagatgataggctcctggaatttctgtccttttggagctcagtaaggcaccaaaccacctgagtcttgtgcttcacaaaatcaaagttcatcagaatcattcattgggatggaattggtgaacagaagttaactttcctgggaatgtccatttccaccatattccgtccttctaggtctcagacttctctactttctttcctctctctagatcggaggcccttcttgtcctagaaccataggcatttcaagatgtgggagaccctagggatcatctagtccacgcatcttttttttttttttttgacagagtctcactctgtcacccaggctggagtgcaatggcaccatctctgcttactgcaacctccacctcccaggttcaagtgattctttcgcctcagcctcccaagtagctgggattacaggcacgcaccatcatgcccagctaatttttatatttttgtagagaccgagtttcaccatgttggccaggctggtcttgaactcctgacctcaggtgatccacccacctcggcctcccaaagtgctgggattacaggcgtgagccactgcacccagccccgtgcatctttttatagagggggaaactgaggcttggagagacccagaaaaagaatatgacctgcccaaggccacacatcaaactagtgccagagccagggacagaacctagatcatgaggactcttaaaatgcactctagtcctcccaggtctgagacttgggtccttccaggaagtgccagcattcctgcctgagaatgtgccaatccaccagtattgccaatgactcagccctccatggagagcttctactaacattactagcatagttagggatggaaggaaaagatttagaagaggcagattcagtaaaggaacaatcagagagatggaattaatcaaggaaggcttcctggaggaggaaaaacttcaacccaaggtttgaaagtagcaagcatggattagcagggagaaagagggagagtggtccagttgagagaaacgtttgtctggattcatatgaagacagatctagtcctgttctattaaatatctctaagggggccaaaaacatacccccgctatcaaagtcagaccagatgctttgtttggagaacgaaatatccacattccaactccctcccaggtgagaagggagctaacctgagcccctatgcctctttgtttccctgctgtgaaccagaagacattgctgggatatttgaaatagggacagagctgggaatatggaaaggagacccctaacatttctccagggctctgggttctggatttggattccccacccaagaaagcaagttacgtcagcaatgcactgagggttgagtcctgggatgccaagggtcggttctttattgtatagcaaagcaggccccatcttcactgactaagaccatctccactccctggccactccccaccaagcattctctgccactctttctcctgaaagtgggggccaactctaccatcttgttctaaccccctgccccagctcacaactctctctccctcttgatgtgagcagcaaacccactttcagagctgtggagattggcccagaccaggatctggatgttgttgaaatcacagaaaacagccaggagcttcgcatgcggaactcaagtgggtaagtgaggggacaccttctggcctacagaaggcccccacatggacgctgctcttcaggttgcaaccagctcacctggaaccccaagcagccaggggaatgtaagcagacatcaggaagaactcctagccagatggatcattcaatgccaagagctatagactcacattttggagaggttttctgtgttgacttgtttttaatacaatggacagctggacaaagtgtgttgtcctactcagagccagagggatggataatgtgacctttccatcaatctggatagtaaatagtttttgctactgctgtaggttttctaataaattgcccaataggcaagattccaaagtcactttgtccttccctaccacttacccagccagagctccccaccttcttgatgctccagggaagaggctccatggcccttgtgggtggcctgttcctgagcctcgccaccctgtgttagagcagagcatccagatgaaatctgtcacactgtggcaaagtggctcagagaggaggctggcttcctagcattcagggacgttgctgagggccgcttattcaccgaaaataaatcttgaaaaggacagggctggtagcagaatgatcctttacctaaaattctatcaaaatcccattcttccatttggaaagcccacagtgtcacagactctgttccgggctctgtcctcttccctcttgggtcccaggagcccaggctgggctttgaagcaggcagggcccagcacacagtaggtactcagcagtgggggtgttgaatccaatcaaacggaagtgtcaatgcaggaaatgcaatggatgtcaatgcagtctccaaatgttccccactgtgcagcttccacattcccgaggtattgggaggggacttgaattaacagcttcgggaggcctgagtccctgcctcccagctgaggaagaagcttaaatcacagggcgctgtgtctgtcttccaggccctgtctctcaggctccctggtctccctgcactgtcttggtgagtacccccaatctctgagggtttggggcctgggccagcaatgagcagggaggaagaccttcatcttcactcctaaatttctgggactccaagtttcattctgccttggtctacagcccttgggcttgtaggtcaatgccccctcgagttgttggtggccttgggcaggtcacattctttttctgggtctttccaagccccagtttcccccttctaccatctgtgcatggctccatgacctaagtggagacctgggagagagtgttaggaagaccgaaaagggcaggacggggcctccactgcctcccatccctggtccgggcccacatagccttctttgtcacaatcagctcaggtatccaagatcagattacccacattcattatttgagcaactattcattgaacagttagaatatgtctcactctgtcagttgctggctagaagtagaaagtaccagatgagtgaaataattggccactatccttggtagctgatgactaagtaagagagagatgcaagacaacatgtggaaaatgccaaactgagtagcagtcacagttgacatgctgcagagagagctggccgggggtcagaagacctgggcaccagtcctgttcatttccagtgtggcctcgagtcattcacctgacctccctgaagttcattttcccaagaagttgtttagtccaactgcccatcaaggatctttagggacccttctagctctaacagaggagatcagaaaagaaaacaagcaatgtggctcagctcatcctacaagcttcatagagaactgagactggcctggaagcatagccagaaattagaacgcctaagggaagaaggtcacaacgctgcctctgcaatttaggagtgtatatgctttcctgcaggatgttgagagtttcattcattatcgtatgccccctaccccggccccacaatacctagtgcgtgggatctgacacgtggtggctggtcaatgaatgaatgaatgaatggtcacaccatctgaggttctgcactgagtagccctgaaggcttgaagcagcataagtgacaggtcctcccttgaggggcctctgttttaccaataagccaagacctaagctcaacaacactgaaagggtggccaatacccaggacagcctgtgggaattccagagaaagggagattcccagggactgggggcccaggctaaacactgaaaaatgcatctgtaggctcaaggaggaaaagcccatgtctgtctgtcttgcccaccactctctcccagcacccagcactgccccaggacagagagcacttgacacaagttggttagattaatgaatgatttagagttcagtggtccccaacctttttggcacaagagactggttgcatggaagacaatttttccgcaaaccaagagggggatagagagcattagattctctctttttttttttttgagaccaagtctggctcttgtcactcagcctggagtaaagtgttgcgatctcggctcactgcaacctccgcctcctggattcaagcgattctcctgcctcagccccctaaatagctgggattacaggcacccgtcaccagcccagctgggactataggcatgtgccaccatgcccggctaatttttgtatttttagtagagacggcgtttcaccatgttggccaggctagtctcgaactcctgacctcaggtgatctgcccgcctgagcctcccaaagtgctgggattacaggcatgagctgcctcacccagcctaaagtctcataaggaacgtacagcatagatccctcacatgtgcagttcacaataaggttgtgctcctacaagaatctaacgccacctctgatctgacaggaggtgaagctcaggtggtcatgctcgcttgtccctgccactcacttcctaatgtacagccaggttcctaacaggccacgaaccagtgggaagggcatctttttggatcaaaaacagaattactttttagagaactacaagcagatcaatttggctagacagagactttatatgaaacagcaggaggctgctaggaggagtggaaactctactttgccctcaagggagatcccgaagggctttgcaggagcgggcaaggtggcatgaagaaagcagtgtttgaaatcaggtggtatttgaaaagcccagcccttccccttagaatggcccttctaccatctgtgcatggctccacaaccgtggtggtggctgccagaagaattggaaaggcagagcatgggtggagaggggggacctgagggctttacaggagttccgggggtggtgagggtgtgaaagccaggtcagtcagtaggaagacaggatgtcagattgagagactcccctggccggggaaacagacttggagaagggggagttttggatgagacagtccacttccgagtcacaaaatagcttgtgggtgtctgtttactgttactcagtgggagtggctggggacacgccacctgggcagggctttcgtaattctgcatcacttgtgaaggtcacagattcccagcacaacggacacacccatgttcatagtctgaactcctaaacacatcttaaaccaaaataaaaaaaaaagaaagaaagaaagaaaaaggagagggaggtttgaggaaagcctatggtctgggacactcaatacctcccatgaatatctcatattgggctggtcctctctccactctggccccagccataagggccctgcttagagcagattttgggtgctgagtggaggcagcctcatccccaacagcctgacttcctgcctcctccctgcctctgcctgtgtccagcctgtgggaagagcctgaagaccccccgtgtggtgggtgtggaggaggcctctgtggattcttggccttggcaggtcagcatccagtacgacaaacagcacgtctgtggagggagcatcctggacccccactgggtcctcacggcagcccactgcttcaggtaagaccccagctgtaaggaggtctctggggaccaaggccagtcagggaccagagagcttggggtcctgtctcctggcaccgtccttctcttcactctcccactagagacgttttccaggttgtggtggccccaatgagacaatggccatgatgccctttgttaggcttttgggtgtctgagcagagggtgctggtcaccaagcatggcctcttcctggtgggacaccagcagatacccagagtcctcaccccacccccatatcgttcaagctacaaaagctcttcccacctgcctcaacttccaagaactcactctctttttgcttgtttccaggaagttgttccagggtctagagtcatagccacgtcctcattatgtctggaaactttaaaaaaattaaagagcataggttcctttcagtccacagagaagcctggccttacctcagggaagggctactcccagacccccttcacttttttttttttttttttttttttttttttgagacagagtcttgctctgttgcttaggctggagcgcagcagcatgatcttggctcactgcaacctccgcctcctgagttcaagcaattctcctgcctcagcttcccaagtagctgggactataggcatgggccaccatgcccggctaatttttgtatttttggtagagacagggtttcaccatgttggccaggctgatctctaactcctgacctcaagtgatctgcccacctcagcctcccaaactgctgggattacaggcatgagccagggcatccggcttttatttattcattcattcaatatctaatgagcacctaccaggtaccaaacaccagatgatgcgcccaagttcattagaccccaccgctgtcttcaaggcactcatgatctaggccagcgttttttaaccacttttttttttttttttttttgagattctggtgagagctataaattctttcctggaaaaacatctctgcacactaagctgtgcctggcattgggaaaaagaaagcacgtaatgtaactgacagcatgagtaacacagtgagaaaggttggaggagagagcgccaggacctcagaactcaggcattagaggagccccttccccagccctccttgaggtttcgttgggcaggtttcactgaggaaaaagggtcaaatccctttttcgaatttgacttcttgtaagtgccagaagactgccccttctccaccatccctgcctcaccatcatctttcctcccaaggcagtgacatccagcaccccgatccctagggccctggggacccagcctttggcaaagtctcctcaggcttggatcaggcctgaacccagctgtctctacccccaggaaacataccgatgtgttcaactggaaggtgcgggcaggctcagacaaactgggcagcttcccatccctggctgtggccaagatcatcatcattgaattcaaccccatgtaccccaaagacaatgacatcgccctcatgaagctgcagttcccactcactttctcaggtgagaagcagggcccaaggccactcaagcctcttacatcagttttcacgcccactctgctattagctcactgaccgcccttggcacataatgtctcctctcaagtcctcagcttgcccatttgtctctaatacgtcagcctaacatcactgatgccatgaggcctcctcaagctgtcagctaacacctccactccattccctgccagagattcttccaaggcctgtcttccctatgtggagcccctcgagtgagaactggagtttcatccaatcttggagttttaggagaccttttaaaaagattatcgagctaattccccaccactgaccaacacgcaagagcctgctcagtatccctgccaaggagtcattgtgcccctgtttgctctcctccaggggcagggaacccattacctgtgaggcagcccacagagtctttgaacagctctgttggatgccttgtgcttatattgaaatgtatttagatcaggattcccaactgtggggtccacaagacactggccccttggagaagagaggattccattgtcaaataagtttggggaacattttcatactacagctcccttcttggaacacattagtttattaaaggtaggagaagtttttaaaataatctgttttattgcgtttaacctacattttttaaatttatttgaccacagaatccttttttcatgctacttctattagcatcccatagaacaagtgttctagagaccctggtgtgacccctttcagagagcttaactgccaggctctcctgagccctggtgtgtgtttcaagatttgtgcctgggaattgttttaatcaggtatggcaaggtgacagatacagacacagctatctttgaaagaagagtttattatttataattcctgagagaaagggacataccccaccccacaacacagggacacccggggaagcagctgggtccaccaggaggcaggagtgaggggaaggcatggcccagagccacctgtggcttccatgggcaggtctggccaaggtagggtaggcaagattgagcatgctcaggattggatagtgtggacaattctctaggctatagatgtcagcctctggttgtctagtatctgtccctggggtgatttagggcagggaaaatattggcttggtgtctgagagtcagataaaggaagtggttggggatatgggctttgggttggctggtttgcctattaaaggcgtgcccaaagccaagttgtttactatctgcaggaattagctaacccagtctctcccagaccagcaagatccccataatcataaagcatcataatttacagaaaattaacacttatgatgaataaaagatctccttcttcctctgtgctcctggcaggcacagtcaggcccatctgtctgcccttctttgatgaggagctcactccagccaccccactctggatcattggatggggctttacgaagcagaatggaggtaagtcctgggtgcaggaccacagggcaggagatgcccttgtatgagggagcagcttccagaagtaatgggaaggaggaccacccttcagagaaacccatcctggaggaccaagcaccaaggcgccaggcagaaagcaaagtggtttggcaatccagggctgggggatagaaggcaaggatgggaatgtgagtgtttttaccctcccagggaagatgtctgacatactgctgcaggcgtcagtccaggtcattgacagcacacggtgcaatgcagacgatgcgtaccagggggaagtcaccgagaagatgatgtgtgcaggcatcccggaagggggtgtggacacctgccaggtggggcctccaagaatcatggggagttctaagaatagggtttaggtcctagagagatgagaaaacccagaggctgcatgccctacaggaagccttgcatatcatgggcactcaatgtgtgatgatgggaggaagagagggagggaaggaaaggatagtcagataaaagtgtaccaatagatgagtgggtggatggatggatgcagacaagcagagagatttcaaatgtctctttcacattcgaagatgatgttactggcctggcatggtggctcacgcttgtaatcccagcactttgggaggctgaggcgggcaggtgatttgaggtcaggaattcaagaccagcctggccaacatggtgaaatcccatctctactaaaaagaatacaaaaattagctgggcgtggtggcacgtgcctgtaatcccagctacttgggaggctgaggcaggagaattgcttgaacccaggaggcagaggttgcagtaagctgagattgcgccactgcactccagcctgggtgacccagcaagactccatctgaaaacaacaacaacaacaaagatgacattactcatccaccccacccacccttctcactagctacagaatgattagccccttgaggtcaggaatcccaggtctattttctctgtgactctccccaagctgctgaactacactaggaaagaattaccgcctgcagaatgctggaagcacatctgtgtgtgccctcaccccggcctcattggccatcaggactgcttagcaatccctgtagaccttcttcctcccccatacttccagaggatcttctgaactattttctttttttattttttcttttatgttttttaacagagacagggtcactatgttgcccagtctggtctcaaactcctgggttcaagggattctcccacctcagctttccaaaatgctgggattacaggcatgagccatcgtgcttggcctgaaccattttcattaaaacccctaccctactctcacctccatttccagtcattaaattccttcatttaagaggcatctcttagtcatcgcatgtgtgccatgaacatggtagtctttggagacccctcagggagctcacagtggttgggggaaaggggtgcattaaacagacatttaagctatagttttgggttcagagggaggaagccccaggggctaaaacagctgataaggactcccagataagtgcacttttcactatctggcattttcttgttttgttatttgcttgttcactgtctctcaccccatttgatcctaagctttctgagggcagggatctttgttttttttcatcagttggatcccaattgcttagaacactacctggcacaaaataggcactctataagtgattacataaattttggaacgactaggttaaacaatgataaccaggctttttttttttttttttgagactgagtctcactctgttgcccaggctagagtgaagtggtttgatctcggctcactgcagcctccgcctctgggttcgaatgattctccacctcagcctcctgagtagctgggattacaggtgcctgccactatgcccagctaatttttgtatttgtagtagagacgggtttcaccatgttggccaggctggtcttgaactcctgacctcaagtgattcacccgcctcagcctcccaaggtgctgggattacaggtgtgagccaccgctcctggccaacaaccaggcttttttaagacatcactcagagcctttaatttgctaatgtgagttgtgaatctctgagagaaggctaacggcatgcttgcaacttacttgtccacagacaagcctttctgccccagaagagaagaccattctagggtgctaatgagcaaagagggtgagggtggaatatcggagagcagcagggagtgcaggggaacagataggccagttcagggagcagagaaggagaagcccccccacctcacctgccctccccagcagtctctgttctggtctctcacagggtgacagtggtgggcccctgatgtaccaatctgaccagtggcatgtggtgggcatcgttagttggggctatggctgcgggggcccgagcaccccaggagtatacaccaaggtctcagcctatctcaactggatctacaatgtctggaaggtaaggtacctttgccctacccactgtgccttccctccagtcctctacctgggaggtgccaatccatcctcaggtttgatttaaatggttctgacaactctttacatcccaaataactttccctccaagcaagggacagcctgagattgcactattaaggctgaaattccttaggtcagagatttctgataaatgcaaataccttagggaatagaacacaccaagcctttctttctcttttctgacagaatgagactatcagatcctttctagagagaagattctgataaggaagagagtggaaaggctcatgagacctcctggccctctgcagggtagggagagaagcaaagtgtttcagaaaaggaagactcacgttacacatgtcaccactttgtccagtttcagataatctgactttctcttcatcggtctctcttattctaggctgagctgtaatgctgctgcccctttgcagtgctgggagccgcttccttcctgccctgcccacctggggatcccccaaagtcagacacagagcaagagtccccttgggtacacccctctgcccacagcctcagcatttcttggagcagcaaagggcctcaattcctataagagaccctcgcagcccagaggcgcccagaggaagtcagcagccctagctcggccacacttggtgctcccagcatcccagggagagacacagcccactgaacaaggtctcaggggtattgctaagccaagaaggaactttcccacactactgaatggaagcaggctgtcttgtaaaagcccagatcactgtgggctggagaggagaaggaaagggtctgcgccagccctgtccgtcttcacccatccccaagcctactagagcaagaaaccagttgtaatataaaatgcactgccctactgttggtatgactaccgttacctactgttgtcattgttattacagctatggccactattattaaagagctgtgtaacatctctggcataggctagctggaatgcttgataagaactgagctgggatgattgaactttcattctttggcttggggagaaaagaagtcctggggaagcaattgagtctcaaagtagaggcaggggaaaaaagagttagggagaccagatctgctgagtggcagcaagagtgagctgcagattacagaaaccagggtgagcaagtttgagtcccacacagggccttctccctttgcctctttccctccctccctgcctgtgataatcagccaggagccagggataacctatgacttgggaaagagatgagttaggcagtcaagggtgacattcaatcagggatccacaagtggctggaaagaaatgctggtcctgtgtcctaactttttccgcctggagagccctcagtgtggcttcttacatttaaaaaacaaaaaggatcagctgccaggtgtgaggcagtccccaagctgagttgtgaggatgtaagcatgaataagtccctgcactcaaaatggtcaaagaattaaaccccatggacttttttggcatctgtatgaaagcttgggttttctgaggactgtcttgctatagttaagtcagatcctagatgaaatatacttgttcatactgtactaggttcttaggaaacaacagaattcctcaaatgcctaaaacaaagaaaatagaaacccagaaaacaaaacaaaataaaacaaaaccatcagaactgtgagtggaaactaaggtgatgatctgggagcaatacactaaaatcttgtgtcgagacctatatgaaggctggcagtggagctaaacctggacatgctgaagacaagggagctgaaccagggctcctacatgaagcagggataactgatggcagtaaatgtggtctcaaattgcagatggtctggaggaaaatttcccaaatttagagcctcaggattcccaaagatcctccaaatatgagctcacaatcaaagatcagagacgttgaaaaataaaaaacaccttaagtgggcagcataaaaaacagctaatttagaaccccaaaggcttcagatgtcagaatattagagacttatgataataagcaatatttgcagagtatttgtatgtgccagacactattgtaagtgcttcatcatgtactgattcatttaatactcacagaaatctgtgagatgggtattattcttatcctcactctatggattaaaaaaactaaggcacaaagtggttaagctccttgcctgagattatagactgtaagttgaacgtgagcacttggaatacagagttcatgctgtaaactaccacactatagggcctccaatatgataatttataaaatatttgaataaaaaatgaatactagttccacattttaaaatcatgtttaactgtggtcaaatgcacataacacaagttgccatcttcaccatttttaggtgtatagttcagtggtgttatgtacattcacactattgtgcagtcatcaccaccatccatctccagaacagaaactcagtacccatcaaacaactctccatttccccctcctcccaatctctggcaaccaccattgtgctttcagtctctgtgaactggattactctgggtacctcatttaagtgaagtcatgcagtattggtctttttgtacttgttttatttcacttcacattgtgtcttcaagtttcacccatgttgtagcatgtgtcagaatttcttccctttttagactaaataatattctattgtttatacgaacattcaggttacttctatcttttggctattgtgaattatgctgctgtgaacatgggtgtacaagtatctctttgaggccctgctttcaattctcttgggtatattcccagaagtggaattgctggatcatatggtaattctattttgaattttttgaggaactgatatattgctttccatagagactgcaccattttacattcccatcaacagtttgcaggagttactatttctccatatcccccctaacacttgctattttctgttaaaaatggatatcttaataatcaagcaaaaataacaggcagatttgaaaaagaactgaatacagcttttagaaataaaaactataattataaaaataaaaactaagtggatggggtaaataacaattaaaacaccaattaagagagaacaaatgaactggaagataaattgaagaagtgactaggcttaacagcagagagagataaggagattaaaaatatgaaaacaaggccaggagcaatgaagcctagaatggtaaattctaacatatccagaatcccagaaagagagaatcaagacaatgagagagagacagtaccaaagagataagagctgagaatgttccagaattgataaaaggtgtgaatccacagaacatacaccaccatagtgtacacgcatacaaccaaggtggaaaaattagaataaatccacacctatgtacattataatgaaactgcagaacaccaaagacaaaaagaaactccttatagcagcagagagaaaacccagaccacccacagtaccacaaatctaccacaattagactgacaacaggctttcccacagcaataaaggagctagaagtcagtggaagtatatctccagcatgccaaaagataacaatcaatcagggattgtgaaccctacaaaactatctttcaagaataaaggcattttcaagaaaacaaaaacagactttaccatcaacaaaccttctctaaaagaatatataaagcatttactttaggaagaaggaaaatgatcctaaaaggaagaaccaagaagcaagtagcaatagtgaggcaattgtgaaaatgtaggtaagtctaaacacactctgtctacttcttcttcttcttcttcttcttcttcttcttattttgagactgagtcttgccctgtcacccagactggagtgcagtggcaggatcttggctcactgctacctccacctcccaggttcaagtgattcttctgcctcagcctcccgagtagctgggattacatgcacatgccaccatatccggctaatttttgaatttttagtagagatggggtttcactgtgttggccaggccggtctcaaactcccgacctcaagtgatccccccgcctcggcctcccaaagtgctgggattacaggcgtgtctacatattattaaaataacaataatatttattttgtgggttaattttttttgaaacagatattgaatttattggttggctatgagtagaaaaatacatcagtaaagaaaaaagaccctgtatataaatataatactagctagttaaaatttgaccaagaagtttccattgtgggttaatttttaaaggcctaactgaaatatggagtaaccacagcatgcagcatgtaaattaaaggggatagctggagttaaaatattctgaagttcttaaattgtccaaaaggagggttaaatattaatgttatgttacataaaatgtttgtactatgttctagatggttagttaaaagagtaatcaccaaaagaatggaaataaaagtgtgtcacttccaaaacaattgaaagtagcaattgatgaataaaaaacaaatacatcaagcaagtacaaaagagaaaggagggaaaggaagagcactaaggagggaaaagcacagaaaaatggaacaaatagaatatacaaagtaggatagtgaaaaaagtactaataatcgcaataaatattaaactcaccaaataatatacagagataggcaaattggataaaaatgtaagatcaagctatatgttatttgtaacagacatacacaaaacaccaggttacagaaccattaaaactgaaaaagtggagaaaggtacagacagcaagcatttaatcaaatttaagctggggtagctatataatatttttctaaataaggatttaggacaaaaagacaaaactgactttaggataaagagggtcactacataatcacgaaagtttcaattcaccagtaagctataataagtgaaaacttgcaaacaaagagaagaaaatagaaaattaaaaaaatcatcctttgtcaccactggagttggcaatcacaccaggctcttactctgaaataatatttaaagaggaaaagttagcactattctgctttgccatagaaatctacttccaggtaacagggtggctccaggtggtgagggaaagtatagctaatcaatatagatgaatgacaggaagccatcattggcaatttctaatgaaatcattgattcaggcaaggatcatcaatggatgctattgtctgaatgcttgtgtcccccaaaatttgtatgttaaatcctaacccccaaggtgatggtagtaagaggtgggactttgggggctgattaggtcaggagagctccctgttcatgaatgggattagtgccccttacaaaagaggcttgaaggagcctctttgccccttctgccatgtgaggacatagcaacaagatactatctatggaagcagagaatgagccctcaccagacaccgaatctgctggcaaccttgatcttggacctcccagtctccagaactgtgagcaataaatttctgttgtttataaattacccagtctaaggtatttagagcagcatgaatggactaagaccacagagaactgcacagtcacataataccctcatatcatcccacggatcccttgctaatctcaataagaaacctaacttcaaaatgaagggatcaggctatcatcaccttacccactaacagtggaatcagcagatactatgttcctcccaacgtgaatatgaagtacaccttcatgttgcatcatctaaaggcatcttcccaaaaatgtttaacataaatcttttagatctaatttccagtgtacaggaaatacaagaattagaggaacaaaacataagaattagaggaacaaattaaatgacaccactaaaagacaaatccagaaggtgggacattccaccacaggacattcccatctcttcaacaaatcaatgtcatgtaattactgttatgtctttttttttgagacggagtcttgcactgtcacccaggctggagtgcagtgcagtggcaccatctcggctcactgcgagctccgtctcctgggttcatgccattctcttgccttagcctcccaagtagctgggactacaggcgcccgccactacgcctggctaattttttgtgtgtttttagtagagacggggtttcaccttgttagccaggatggtcttgatctcctgacctcgtgatccgcccgcctcagcctcccaaagtgctgggattacaggggtgagccaccgtgcccggccaattactgttatgtcttaagaggcataacaatcaaatgtaaggcatgggctttgaccagatcctgagttgaacaagttagcaacaaaaggcatttgggcaaaggggtaattgggaaatgtgaatatgatctcagtattagatgataataaggaattgttaatttcattatgtgtgacaatgatatagttaagtaagaaagatattcttaacttttagagatgcatacagaagtatttggggtaaaatgatgcaaagttgtaattaaaaatacttcaggaggggccaggcatggtggctcatgcctgtaatcccagcactttgggaggccgagtggggcagatcaccaggtcaagaaatcaagaccatcctggccaacatgttgaaaccctgtctctactaaaaatacaaatattagctgggtgtggtggtgcgtgcctgtagtcccacctacttgggaggctgaggcaggagaattgcttgaacccgggaggcggaggttgcagtgagctgagatggcgccgctgcactccagcctggcaacagagcgagactccatctcaacaaaaaacaaaacaaaacaaaacaaaacaaacaaacaaaaacacttcaggaggaaaaaaaactgttaaagcagatatggtaaaatgtcaatgagtgtgaaatctagggaatagatttttattattctttttacttttctgtatatttgaaaattttctcaatttttttaaaacttatataaacacaatataaaatagactcgaaagctgatagaactataaggagaaattgacaaatccaccatcttatgaagtggaagattaagcacacttctctcaattattgatatgtcgagcaggtgaatagtaaagaatggaagattaaacaataccatttacatgcctgataaatagacatatactatccatacttagcaaaaaagcattcttctcaagcacttttgtgaaaattgactacatactagtccaagaagtaatatcaacaaatttcaaaagtaacgtgagcaccaggcctagctttgctcccttcaatttccgctcagcctccccagcatcccccatcttcccgcctctaggctttagtcacttgcccgcttacttctttgaatgggcccagctctggccccttccattcccgcagttgtaaagctctggccactgccaccacctcctctcctaacactaccactggtcttcccctgccctgggccaggaccagagctgggctttgggttgggtggccttcgttgcatgcaccacggtgacagccacagcagccccagctctcagactggctgactgcacccagagagctctgacttccccagggcttccgggaaaggctgagtaacaaaacatggaaatgattgtctgtggggtaaatgttgaataatggaagatgggagacaggaaggagccagcagataaatggcttctccttcttccctaggatagaactattcagagaagctgtaactccccagggacaggtcttgtgattcagcaaccagctgtaccgctgatggagctacggtcagctcggcacacacatcgcctgaccacctgtgtttgctttctctcattccctgccttacagcccctgtcccccttatgcccatttccctgggattgaacccccaaataaagtgttaagatatgaatttaatgtagaaaacttaagttttctgagaaacctgggctaagactatcaaacagatgtagctctttgattataacgttattaagttctaaggcaatagcaaacaataattttgtttgtttgcttgttttttaattgtgttgttgttgttgttgttgttgttgtttttagacacaggatctcactccgtcaccctggctggagtgcagtggcacaatctcggttcactgtagtctcaacctcccaggctcaagcaatcctcctccctcagcctcccaagtagctggcactacaagcacacaccactatgcccagctaattttttttttactttttgtagagatgaggtctcactatgtggcccaggctgttctccaactccagttcgagtgagccaccacacccagcccgcaaacaataatttttaaaatataaaatacatacatgctttaaaaaaaaacttctaaattattcataggtcaaaggagaaatcataaacaaaaatgtacctaactagaatgataatgaaaaaaatatatattatatacatatgcagacacacacacacacacacacacacacacacacacacacacacatatgtacattcatggaatgtctcagtgtgacatttagcagctaaccttgaaatgcttgtgctctttcctgatctggacttggactgagatgcacctacctttgcacgttacactcagagcacaagtgattctgctggggaggtcaagagggaaccaggaagttatgacttgactaacatggcaaatcctcactgtctttggaagggaggatgtggagaggaggatgatgggtagagaagatcctcccctttttcacaaggaaggaagaagactaaatcctagagaggtgaggcccgaaaacagagcatgggcctggttctcccaactgtggcccagagctgcctccacaagaaggtgcccccaccctcacctgcaagccattacaggaccatgatggagggtgagtgcaaaccttggccaggtgctggagcaggaagtaaagaaaactccagccccagcccgttagtgtttaggggcaagcagagcaaagacttttcatacaaagtgggaaagaactgcaatagaggcatgtgtcactgcagcaaacaggcgcatacccattccagggaggtgtttccagctagagggctcagcacatacaaaggaacaagtaccaagaagctgggttcggcacgtacaaaggaacaagtaccaagaagccctatgtccagagaacagggagagtttagtgtgggagagaaaaacagaaagggaatttgaaaggagcgatgtgggagcacgctgtagtgaagagaaaaaaatctgggcattagaggcagggagactgactcaaaatggtgggcccgtgtgtgtgtgtgtgtgtgtgtgtgtgtgttgattacaaatgtattgcatagttataaaaattcaaacaatactaaaggtttaaaaagttagactgggcatggtggcactttgggaggctgaggcaggcggatggcctaagcgcgggagtttgagaccagcctaagcgacgtggtgaaaccccatctctactaaaaatatgaaaattagcctggtgtggtggcatgtacctgtagtcccaactactcaagaggctgaggtagaaggatcgcttggacccaggagatcaaggctgcaatgagccaagcttgcaccactgcagtccaacctgggcaacagagcaagacctcgtatcaaaaaaaaaaaaaaaaaagaagatatccaagagtccatgggggccggaacaatagggccttctgggctgctatgaggactgaataagatagacactcgttctgagcaagaaagagtgacatcatctcattgtaatttttttaaagtgtaatttacatacagtaaaattcatttttagtgtagaattctgccaattttgacaaatgtacacaagtaagcaactaccaccatagctccatcacccacaaaaagcctcgcttgccctttatagccaacccgtccccaacctatagcgccttacaaccactgttttgtttgctgtccctattgtttgctgtccctatagtttgctttttccagaatgtaatataaatggaaccatatagtaagtatctttttgtttgtttttgaggctttaggctttcttttttttttttttttttgagactgagtccagcccaggctggagtgcagtggtacgatcttggcttactataccctctgcttcctgatttcaagcaattctcgcatctcagcctcccgagtagctgggattacaggcacctgccaccatgcccggataatttttgtatttttagtagagacggggtttcaccatgttggccaggctggtctcaaactcctgacctcaagtgatccaccatcctcagcctcccaaaatgctgggattacaggcgtaagccaccacgcctggacttaggctttcttaatacttcactttttattttattgttaatttttattttatttatttatttatgttttgggagagacaaggtctcgctatgttgcccaggctggtcttgaactcctggcctcaagggatccttacaactcagcctcccaaagctgaaattacaggcatgagccaccgcaaccaacccaacacttaatattttttttagagcagttttagtttcacagcaaaactgagcagaaggtaaagagatttcatatatactccctgcctccacacatgcaggagtgtccctcattatcatcaacacccccaccagagtggtacatgggtcacagatgataacgcaggtacctttctgagtctgaattatttcacctagcatactgcatttgagattcatccagtgctttcacttagcatactgcatttgagaatcccatagtgcatgggattttgtggaatattccattgtattgtatggctagacacagtttgttttatctactcaccagtcagagatttaggttatttatttgttttggcaatggcaaaacctctagaagcaactctgtacgggtttttcagtgaacataaattttcatgaatttcttctgacaagaatgcagtaacaaaaaatgcaattactttcccatctgaaacaactaaaacgctggggggaaaatgcacgaaatggctttcagacacagggcatcaggcagcacaggtcagtgattcctgagagcggagaaccaaatgagggagccctccaattgctacagcaccaggaaaggggactcgggcagagtctggcaacctctcagaatcaaggagatggagtcaggagtcctgtggatagggctcactgggcagtatctcagagaagagacagcttcacagagacagcgctccagagatctgcaaacggtccccgtgagccttcagctgctgatccaggcacacccgaggctgagaaagaaccaccagaaaag

SEQ ID NO: 139 - DNA, 2590 bp, Homo sapiens
actcctggaatacacagagagaggcagcagcttgctcagcggacaaggatgctgggcgtgagggaccaaggcctgccctgcactcgggcctcctccagccagtgctgaccagggacttctgacctgctggccagccaggacctgtgtggggaggccctcctgctgccttggggtgacaatctcagctccaggctacagggagaccgggaggatcacagagccagcatggatcctgacagtgatcaacctctgaacagcctcgatgtcaaacccctgcgcaaaccccgtatccccatggagaccttcagaaaggtggggatccccatcatcatagcactactgagcctggcgagtatcatcattgtggttgtcctcatcaaggtgattctggataaatactacttcctctgcgggcagcctctccacttcatcccgaggaagcagctgtgtgacggagagctggactgtcccttgggggaggacgaggagcactgtgtcaagagcttccccgaagggcctgcagtggcagtccgcctctccaaggaccgatccacactgcaggtgctggactcggccacagggaactggttctctgcctgtttcgacaacttcacagaagctctcgctgagacagcctgtaggcagatgggctacagcagcaaacccactttcagagctgtggagattggcccagaccaggatctggatgttgttgaaatcacagaaaacagccaggagcttcgcatgcggaactcaagtgggccctgtctctcaggctccctggtctccctgcactgtcttgcctgtgggaagagcctgaagaccccccgtgtggtgggtgtggaggaggcctctgtggattcttggccttggcaggtcagcatccagtacgacaaacagcacgtctgtggagggagcatcctggacccccactgggtcctcacggcagcccactgcttcaggaaacataccgatgtgttcaactggaaggtgcgggcaggctcagacaaactgggcagcttcccatccctggctgtggccaagatcatcatcattgaattcaaccccatgtaccccaaagacaatgacatcgccctcatgaagctgcagttcccactcactttctcaggcacagtcaggcccatctgtctgcccttctttgatgaggagctcactccagccaccccactctggatcattggatggggctttacgaagcagaatggagggaagatgtctgacatactgctgcaggcgtcagtccaggtcattgacagcacacggtgcaatgcagacgatgcgtaccagggggaagtcaccgagaagatgatgtgtgcaggcatcccggaagggggtgtggacacctgccagggtgacagtggtgggcccctgatgtaccaatctgaccagtggcatgtggtgggcatcgttagttggggctatggctgcgggggcccgagcaccccaggagtatacaccaaggtctcagcctatctcaactggatctacaatgtctggaaggctgagctgtaatgctgctgcccctttgcagtgctgggagccgcttccttcctgccctgcccacctggggatcccccaaagtcagacacagagcaagagtccccttgggtacacccctctgcccacagcctcagcatttcttggagcagcaaagggcctcaattcctataagagaccctcgcagcccagaggcgcccagaggaagtcagcagccctagctcggccacacttggtgctcccagcatcccagggagagacacagcccactgaacaaggtctcaggggtattgctaagccaagaaggaactttcccacactactgaatggaagcaggctgtcttgtaaaagcccagatcactgtgggctggagaggagaaggaaagggtctgcgccagccctgtccgtcttcacccatccccaagcctactagagcaagaaaccagttgtaatataaaatgcactgccctactgttggtatgactaccgttacctactgttgtcattgttattacagctatggccactattattaaagagctgtgtaacatctctggcataggctagctggaatgcttgataagaactgagctgggatgattgaactttcattctttggcttggggagaaaagaagtcctggggaagcaattgagtctcaaagtagaggcaggggaaaaaagagttagggagaccagatctgctgagtggcagcaagagtgagctgcagattacagaaaccagggtgagcaagtttgagtcccacacagggccttctccctttgcctctttccctccctccctgcctgtgataatcagccaggagccagggataacctatgacttgggaaagagatgagttaggcagtcaagggtgacattcaatcagggatccacaagtggctggaaagaaatgctggtcctgtgtcctaactttttccgcctggagagccctcagtgtggcttcttacatttaaaaaacaaaaaggatcagctgccaggtgtgaggcagtccccaagctgagttgtgaggatgtaagcatgaataagtccctgcactcaaaatggtcaaa

SEQ ID NO: 140 - protein, 431 aa, Homo sapiens
MDPDSDQPLNSLDVKPLRKPRIPMFRKVGIPIIIALLSLASIIIVVVLIKVILDKYYFLCGQPLHFIPRKQLCDGELDCPLGEDEEHCVKSFPEGPAVAVRLSKDRSTLQVLDSATGNWFSACFDNFTEAETACRQMGYSSKPTFRAVEIGPDQDLDVVEITENSQELRMRNSSGPCLSGSLVSLHCLACGKSLKTPRVVGVEEASVDSWPWQVSIQYDKQHVCGGSILDPHWVLTAAHCFRKHTDVFNWKVRAGSDKLGSFPSLAVAKIIIIEFNPMYPKDNDIALMKLQFPLTFSGTVRPICLPFFDEELTPATPLWIIGWGFTKQNGGKMSDILLQASVQVIDSTRCNADDAYQGEVTEKMMCAGIPEGGVDTCQGDSGGPLMYQSDQWHVVGIVSWGYGCGGPSTPGVYTKVSAYLNWIYNVWKAEL

SEQ ID NO: 141 - DNA, 2627 bp, Homo sapiens
ttttaatcaagctgcccaaagtcccccaatcactcctggaatacacagagagaggcagcagcttgctcagcggacaaggatgctgggcgtgagggaccaaggcctgccctgcactcgggcctcctccagccagtgctgaccagggacttctgacctgctggccagccaggacctgtgtggggaggccctcctgctgccttggggtgacaatctcagctccaggctacagggagaccgggaggatcacagagccagcatggtgagtgatcctgacagtgatcaacctctgaacagcctcgatgtcaaacccctgcgcaaaccccgtatccccatggagaccttcagaaaggtggggatccccatcatcatagcactactgagcctggcgagtatcatcattgtggttgtcctcatcaaggtgattctggataaatactacttcctctgcgggcagcctctccacttcatcccgaggaagcagctgtgtgacggagagctggactgtcccttgggggaggacgaggagcactgtgtcaagagcttccccgaagggcctgcagtggcagtccgcctctccaaggaccgatccacactgcaggtgctggactcggccacagggaactggttctctgcctgtttcgacaacttcacagaagctctcgctgagacagcctgtaggcagatgggctacagcagcaaacccactttcagagctgtggagattggcccagaccaggatctggatgttgttgaaatcacagaaaacagccaggagcttcgcatgcggaactcaagtgggccctgtctctcaggctccctggtctccctgcactgtcttgcctgtgggaagagcctgaagaccccccgtgtggtgggtgtggaggaggcctctgtggattcttggccttggcaggtcagcatccagtacgacaaacagcacgtctgtggagggagcatcctggacccccactgggtcctcacggcagcccactgcttcaggaaacataccgatgtgttcaactggaaggtgcgggcaggctcagacaaactgggcagcttcccatccctggctgtggccaagatcatcatcattgaattcaaccccatgtaccccaaagacaatgacatcgccctcatgaagctgcagttcccactcactttctcaggcacagtcaggcccatctgtctgcccttctttgatgaggagctcactccagccaccccactctggatcattggatggggctttacgaagcagaatggagggaagatgtctgacatactgctgcaggcgtcagtccaggtcattgacagcacacggtgcaatgcagacgatgcgtaccagggggaagtcaccgagaagatgatgtgtgcaggcatcccggaagggggtgtggacacctgccagggtgacagtggtgggcccctgatgtaccaatctgaccagtggcatgtggtgggcatcgttagttggggctatggctgcgggggcccgagcaccccaggagtatacaccaaggtctcagcctatctcaactggatctacaatgtctggaaggctgagctgtaatgctgctgcccctttgcagtgctgggagccgcttccttcctgccctgcccacctggggatcccccaaagtcagacacagagcaagagtccccttgggtacacccctctgcccacagcctcagcatttcttggagcagcaaagggcctcaattcctataagagaccctcgcagcccagaggcgcccagaggaagtcagcagccctagctcggccacacttggtgctcccagcatcccagggagagacacagcccactgaacaaggtctcaggggtattgctaagccaagaaggaactttcccacactactgaatggaagcaggctgtcttgtaaaagcccagatcactgtgggctggagaggagaaggaaagggtctgcgccagccctgtccgtcttcacccatccccaagcctactagagcaagaaaccagttgtaatataaaatgcactgccctactgttggtatgactaccgttacctactgttgtcattgttattacagctatggccactattattaaagagctgtgtaacatctctggcataggctagctggaatgcttgataagaactgagctgggatgattgaactttcattctttggcttggggagaaaagaagtcctggggaagcaattgagtctcaaagtagaggcaggggaaaaaagagttagggagaccagatctgctgagtggcagcaagagtgagctgcagattacagaaaccagggtgagcaagtttgagtcccacacagggccttctccctttgcctctttccctccctccctgcctgtgataatcagccaggagccagggataacctatgacttgggaaagagatgagttaggcagtcaagggtgacattcaatcagggatccacaagtggctggaaagaaatgctggtcctgtgtcctaactttttccgcctggagagccctcagtgtggcttcttacatttaaaaaacaaaaaggatcagctgccaggtgtgaggcagtccccaagctgagttgtgaggatgtaagcatgaataagtccctgcactcaaaatggtcaaa

SEQ ID NO: 142 - protein, 433 aa, Homo sapiens
MVSDPDSDQPLNSLDVKPLRKPRIPMFRKVGIPIIIALLSLASIIIVVVLIKVILDKYYFLCGQPLHFIPRKQLCDGELDCPLGEDEEHCVKSFPEGPAVAVRLSKDRSTLQVLDSATGNWFSACFDNFTEAETACRQMGYSSKPTFRAVEIGPDQDLDVVEITENSQELRMRNSSGPCLSGSLVSLHCLACGKSLKTPRVVGVEEASVDSWPWQVSIQYDKQHVCGGSILDPHWVLTAAHCFRKHTDVFNWKVRAGSDKLGSFPSLAVAKIIIIEFNPMYPKDNDIALMKLQFPLTFSGTVRPICLPFFDEELTPATPLWIIGWGFTKQNGGKMSDILLQASVQVIDSTRCNADDAYQGEVTEKMMCAGIPEGGVDTCQGDSGGPLMYQSDQWHVVGIVSWGYGCGGPSTPGVYTKVSAYLNWIYNVWKAEL

SEQ ID NO: 143 - DNA, 83009 bp, Mus musculus
  misc_feature (1)...(83009): n = A,T,C or G
aatttagagaattttgttgaggcgtaactggtaggagcaagtgctgaacggtgtctatctctgctgtgcctactgcttagggggactggaaaggcatatttcagtaccactgactgcagcgggagccatgtccatgctcctaaagtctgtgcttttgatttagttaggaagttttaacatagaatctgtgtagcccagtcctggctgttgttgtgcatatactaaatagttggccacagagttctgggtaagagaaaattctgtatagtagcaacaaaacctaatgtttgtgctttggggtgactgtcaagtgtggtaacaagtgatttggatctcagtcttacaaaccctttgtctcccttgtggatagctgtagcttcagaagtggagctagttctgttacctcaattgaagcagccatttcctgtcatctcagactttagctaatctgggggcccaagtcacaaccccataggatgcactccatccactctcagctgcttgatacaccactcatcccttttgtgtgattcccctccccccaacccccttgtgcatccgtgcttttggacagcagggcttgctcggccccctgtcactctgcagaaccgtcacttaagagtcccagggaacggcatatatcttattatcagttcattagcaaagtggctgacacagacgatcaacagttggccttcagcacagctccactttgtctgggagaagcataatgcatttcgaaatgctggcatagcagccagccttgagttggactgaggcagctccatctaacactgtcctttcttctttcgccataaacgcgcatcgcagaatcgagcccattgaggggaaagcatttgctctgccaacacaattagttttataaaaagcctctgtcttcagattgttcttccccaaagtccaagttggatgactgtggttattttttaattaatatttttaagagcctccctccttctcccaagagcctctaagcagatttaacaggcttaaaagggactctttcacaaggtaacttcaatgccatctcccaagcaaataaaattccatttgagggttctgtttttccccatctctttttaaaattttccataaagcctacccagtgggggcagtttttcttcagggttaggtagtattctctccaaacaacaacaacaacaaaatacgttatcttgttgctgaaggatggagccatgcaagctgtccagcaggagtggagggaatctgtgctccttcccatccagcgtgaacagcagcaggattcagcaatcactagtaatctttctggtttatttttatattctcatttcatttgttgctgtcagtttctttgattcttgcattttaattgaaaagctaattcagacctttggttttcacgactggcaccactccatagatacattccgtgtggtggctcacacctcctccttttgggagatcagacgagcttagaccttaagcgtcataattggcttggcctttttagtggtgaaggccttgattaggaagttattgaacctggagtctttcaaagggaagaaagctaatgtgatggttggaattgaaacagcacagacacgcatgctctgtcactacttcctttgtcactcacttccttgaaaagagttttcatgtgtcttttgcacaaaagagatgcccatccatgtaaattcagcttgtactgtacttgatcccagttcttcagcctccatgctgaaaaccaataaaggaaacggtaaaaatagcgaggtgtgtgttcatttttaaagttgagactctggtcacctttagtttggcatggtataaggatcagtcccctgggagggaaaagcagaaatagctcttcttgtagctgagattaaagagtttcatggggccaagaaaaactttacataattccttacagtaacttttctcctattttaaaaccagactactttgcagtctgtaaggtcagggtagaattatcaaaaatctcttcactctggaagatgtgttggccttagatctgtggaaaccccgggtgctagggctgtgaaggagacatcttgctgtgctgtttcatagctctctccaccccaagggacttcaaaatacaagggagacaggagaggcgagatttacagaatcgggcctttgtgtcccttggtgtggctgatgctcacggagacctgagctgcatccactgtggcaagccacctgcatgagcatctgtattctctcctgtgcttccttcccttgcattgtggagtcaaaggtgaaattccatctttaacccccgtatggttgtctgagctgtgattaatgaagtagatgtgactcccggcacagctttcagagggtgggtgggagaaagatgaaatttcagccttaaagaaaacaaaaacaaaagcaaaataaacataaaccaggccttttgcttaatacagcttttaaaattaatatccattttcgaatgccaagaaaacaaaggggatttctcagaagtgtatgcagcttgccacaataggccttaattggtgtcaaggagatgttgggatgaacgaggaaatgcccatttagctgataaagactgaaaagtggaaccttgttatgagctgtcatctcagcatgtatttaaactatagcaaaactgaaacatatttgccatatagatcataatgactccaaaggagccattatactctattatgtaattacataatcaaagcatgcatagtaatcagcttttggaattcaatgctaatcaaacatacctatactatgtgtttaagctaaaatagagagcgttaatttgccattagtcaactaaacaagagtgtgtatacagaatattcatgaatagcttaatgttgtgtcagatactttttgttttgtatgcggggggaaatcaacaattatactggaagaaaaaccagtaccaaggatgaatactctttagctcgccgttcagaaatctgcctcaccttttactgattgtcaaaggagattagcgtaaattcaatagtttttccttctataagctcaaatgatgcaaaagtaattatagaacagtagatgcttaggagggtctgggcacctgcgtgcataggacacaacttagaactactagctgaaaacatagcaaagccttcagaaccaaattcgagcctatattgcttttataattagaaacacatcaatacatgttatttcgaaagaggtgagcagagtcactccttgagggctccgtgacaggttatctggcctgtcctcttggagacattggtgcttgccctggagtctctgcccagggtctagctctgtcaagaagaattgctcttggaagtttctttggcttctttgaataaagaaggtggtaccgagtgcttggaccagcgtcagaaatctttgtcatttcagttactgttggtctgtaagctcacggtcacagttgttttgaccgttatgaagccaggactggtccttggaacagacagtctcaacactcccatttcactttgggagacagaaaaacatggataaggatcaaaaaggttaacagaagctttgtaaaccatagatgggttgattgcttttgactttgaataaatattcaagtattcatgtaccttccttaaaaataaaaaattgtatttgttttgaagcggtcatctccttaacctttaaccccccagtgatggaactctcttttaggactcggcttttgctgtctctcatcagtatgtggccgactcagaatgttactgtcatgtttaaatgggactgaattctttcatcaaaagctttcgtggcttgaacttcaaataatttattttcaaattacttttactgtaattcttattaattcaaataggtttctgatttgatataaaactctgtaaatgtagggaacagtttaatgaattgaaagataggattgagtcttttaaaggaaatgtacaaaatatgctgacaataattgcttagatagaaatcaaatcttaatggctttgttaatgatttgtagcgcacactgtgtttacgttgacttgagggaacgtatgtagttagatttctccctctgggtttcaacagaatcttaatttttttcctttcatttcttttcctggaacatactcatctctgttccggctcctgaaaactttagctgaaactgcagtgcctttgcctttaataatagtttcacttggtcaggatggactgtcttcttctgagttaggtacatctttaacagggtagtaaaaataaaatccaatagaagggaacatggccgacaaaccagggcaagcttcaggtgacatggggcacccataatagtcaaaaataaggtttccaaagtcatgcaggtgttttgtttctttgatagtttcaaactttgatgcctcttggagaataagaatgtataaccctgagtctttgactgctacaaagcttccagaattgggcctgaggagatggtgggaaagagttcgtgctggtcaagccagaggacctgagtctgaaccttcatggtgggcatcaaagctgggtgtggctactcctgtctatagcctagtgtggggtgactagagagacaggcagtcctgcgggctcactgaccacgaggctagcaaaaataccatgagttcccaagtccaataggaaccccagtattcaggaagtggggtagaggggcagagcagggcaccccccccccccatcctgcgttggcctctacacctgcttgcactggctcctgttcccgcacacagaattccagaaggacactttcaaggactgtagtacaggtttttaagtgttcactgagtttgtcatcattagcatgggttttctgttagccctctgcatttgggacttgagtgcctcctgtttggacagtaaccctgccaagttaatgttgggggttcagctttttcctagagcagggatgtagacagagtttctctaatatgatttagctgatgggggagcagcccaggggctttatgtgttgctccattgggcaagccgcccgcccagttaagtgtcacagtacctggtccccctctgtgtgtgtgggtaggtggcagttgccatagctgccaccacataagctaaaatctgttttaactctgacttatccttttattatgggctggactggggagcctcccccagtatgaatgaagagttttatttgttaacagccaggcagcaagggcgagagctttgggcactggcaaatgcccaccgtgccgtagtaataaaggctttctctgggggcagagagtgctgagtgcagaaggaggaggaggagacagcagtaaacaggtattttacattcaggacggcctctctctcatcttgaagtgtgtaattgtgttcaggataaattatggaaataaaaaaaatcacaagttgctcataaggaaataaccctctttaaaaacaagtaaatttttcaagacagagcccaaagggccttagcaaccagttctgaaatattggctggtaagcagggtgtgtgtgtgggagggggggagtgttccagaaccaggttctaacaccagttcagctcacccacttagtggaactggaccaggcaacttccttccctaagtcagactctgcagtccaatcgttacggcagaggcagtgaaacaggaaaagtctggagatggggaagcagcccagcactgggcacaccttagttctccatcatgtttctcactgccaattctggctttgagatcctgtcacttgtgacttccataaggacatactgttgattgaatagactcgattgagttcagcattttatacaataccatctaaagggagagtataaaaatatggggtttgagcaaagtatctcgaacaattatattaactgaaaagagctaataaggaattaatgtccctataccactcctaacaaggggctattatggccactggtagtcatcagagtaagtttcaccttttgtagacaataagctttcttgtcattgtctgtctaagaaatgtctggtttaatggaaggtgcttgctcatggatgaagggctctctttgattctcagatttgttttggggaattatggagcaactctgaaagttagtcaatgtggtggggcgtgtctgtaatcctagtgcacttcacagtgaagaaaggctagcctgtgctacatagctaggagcagaccagccagaggcacagagcaagactggttggaaaaacaaactacagggctatcatgatggaacagtgagcaaaggctgggagcccacatggtagaaggaaataactgactccagaaagccaccctctgacctccacacgtgcacatgtgcacatgcgcacacgaatagatacagagaactatgttaaggaaaatagaaaacaaaaagtctgaaatttataggaaacagccctatatcacaataagttcttgtataaattaaaattcagcttgattctgtctcccaaacttcatccaaatataccaattagtggtcaaaaatgtctacacacgccagccactgctctactcttaaagtaaattacctggctgttaacagcctcatttaatcgctagatattctacctgtttgatttctgttccccagaacgtgtactgttccttccttgacagtctgtcagctaattgagttttagaaaactcggaaggattttttaatgcagtctttaaaaacgatacggaaggtgcttgtttctctcctgctacacatgagattgcattttgtgacaacctaattgtctcaacatccatttcaagggggaaatttatcaagtcctagtatgtaccctttcttttggaagacatatttgaggatgtgagcagaaattatttttacataaaggcttcaggcagtagagtactgacatatatactgtattttccttgctgtcactcaagtcctttgcctcaaataaataggtcattattatcccactgcagccatctatggtacctcaaagtatagggctctgtttaatataactgtcatccagctgacccggataatttattggtggtttttaaagaatggcatccttgggccaccaccatcaaccaacgcactttgattctttcagccagatatttcattatcacataatgtttttgtattgatagtacaaccatattagcatagctagaagttgacatgtctctgagacactgggcttctggttggtcttaattaaaaaaaataataagtccgtgatgttaacatcacataacaacatcaccgtgtatcttcagagcagcccagcaaaggcagaagtttacacatggccaaagtttacctgagtgacttgttctgtagtgacatggtaaacgggctagacatgtaatacccccactttcaggcatgtgtagtgtgtgttataaacaactttgacttgatgttgtcactatttttgtttttaaaatgcaaaaccatgctccactctttgacttccatcccccgtgcatacaggctactatgaatataataaaggcgcctcctctcagaatatactggccttagggcttccatgaaaggctaaaattaaagccaagttatttccacagaaactgtcttattagaacaggattaaattagaggcagctttaagtctcggaagcttcagagaagtagttggtatccaaaggggttgatgcctgtcggctcacagcctctgcacgtggaccttctgtggattgaagaatcttgtttgtgttgctaataaactctccgaagatagaagaaatccctgcctgcccccaaaaggtcttgtttggtgtcctcatctcctaaaggcaagcccatggtttaacactgcttcatcctcacactatacagtgtcattttccttaatttcctcggttaggtctcccagcaaacacccagtgtctggtgtcctgctttctagtcacttttgtgcagtactatcagatccacctggcagagctggctcggttggcaggaatttctgtcaccttgttcttagcttgtgccttggaataactcatcccttcatgctggcttctgtattctgtgtttaccacaggaatctcaggacaaacaataaacccccagttgctttttctgatcacctttcactttgctgttggtctgtaacagccttcagcccctagaagcttccgcaggacagtctgcctccctcctgctacacaggccagtgtcctcacaacggggtcattctctggggtcacagagctcagggtcaagattcattggggttttctctgcaagcattctgtttatctgtgtccctaatcatgtctccttattcttctggtttcctctcttctaatcctctgtcaggcagctggtctatttctaggtggatttggctttgagccatcttagacacccatcacacttcccccactgtgtcctgccaagaaaggatccttcagagggaatgtgatcgcaggtggaaatcctccatttattctaattgtacctctgtttatgctgcctcgatatttttttaaaagtagcatttatctttgacctttgcttcttgatgtgacaacatttcttcaagaagtgaagaagccaccctaagctgacacatcccagctacacagagagctcctacagagcaggaatccttagcctgcgttcttgtatttactacccccacacatgacagtggcttagtacctgtggggatttggaggtctagagaaatgaggagggtgatgtggtgatggaagtggtggtgatggtgatggtgatggtgatggtgatggtgttgatagtgctagcagttaccatctgtttggtttgacaagaagctagacacagtgttaactgctttgtgtgtatgacaactctgtgggatagctgttaattactgcccccattttgtagatgggaaactgtctcggggactttacataaatttcctgatataagagcagtctgtttttcccccttcgtgactgactgttacatctgctgcctgtaaatacaccttttgcttgggaagtagagatttggtgtctgttttacccgcatctcggcttcttaaaggctaggagagtgtcccacacttccctgtcccctgctatgccaaccacagaatcaaacacatcacaattccttatcttctgcttctaaattgaacgtctgccttgtgctgtggatctttttcacacatttaggagatgctctggctgctggaacaaatcttgatgctgcaaactagagcagatacggagataagccttgtatcagtggagctgaaagctctcacattttggcatgttctggaaattttttcacagctgaaggggtgatctgcagggagggcagtgagctcagggctgtcttcagctttgggtgagttatgaaggtatatttttgagagctgaatcagactctcaaccgtaggccttctggatcttactgaagtcccaaagagttataggtagtttggtcctcactctcatacaggacaaaatggactgcctgtgcgttgggaatgtcagcatctgctaactagacaaggccattaaatgagtcttcctgtttctgcttcagtaattgacccatgagtttagctcggatcaaggacatgtggtctaagcttggccataccttctgtgttttagatgggagagcttccatgttcatagcagctagtactctgatctttctggttccacctcagcacactgtgggacagttcaaaatactggaagttgggacaccagcactacttcctttcttagagccacgtcagttccaagcttcattgtatctcggcctagatctcccttagtttgactcattttgtgaacgggagaaaagtacttagggccatatcagatgttagttttgtaatgcgtttctcacttcatttgtgctttaatggagctcttggaccaaaatgtaactgatgggacttccatctgacctttctctttcttttcttaaaggtgatggacagaatctgtttactaaagacgtgacagtgattgaaggagaagtggcaaccatcagctgccaggtcaataagagtgacgactcagtgatccagctcctgaaccccaacaggcagaccatttacttcagggacttcaggcgtaagtctctgcccaccggattagacagcaacttttgtttacctatgtgttgtcttgataaagagattgccaaggccacctctttctaatttaatgttagatgcttaaagtttagtcaattcttgagagagaagaagagacgggcaatcataatctttctacttaatagaaaccttgaatggtcccctttaaaagtcttactttgcaataggaattgattgtagtaattcaaggtgaattgcaatcgagtcccaaatacttagctgacacaaacaactcaaatagggttcggcaaggaaaatatagcattctgatagggaatctgtttggtttaaagagtggtgtttctaaggcaatctatacctgtaatgacaggaccagagctttcaccataacctctgctgtacagagatagccatacgctgaattccatttaaatgcaatttaacaaaagccagcctttgaaactgaattgtatatgacaccaaaggctcacgccgttgccatggcttggcaagacacctcactgaagcaagtatcatcatgcctgttttgggctacttggcctcctgtccctcctagtattttgggccatcctgtgggaaaagttgataaacaaggtggaacatttaaaggactcaagaagggcccatgacatgtctgaagtgcttgtcccaagcctgacctcctgagtcccagtccaaaacccacctggtggaagaagagtgcctctccacagggtggtcccatttcacatgcatgtgctgctaacagcttttgctaaatgaagaagacttggaaaaacacttctcatattaaacaagaagcccacatacagtactttgtgatggttctaatttccttttgtggggtttgatcagttttccactgtgaggtggacatgcctaaaaatctatgtaaccagctacagcctctaaaggccctgcctgagtcaggctctcccacccaattcatgtcccctaaattcagatgtggccaagttaaacggtcttctaaaacatgtttaaaattgatattttacattttgctttgaaattactttttttttttttagttttcttttagttttctttcataatttgggccaccttgtttttgttgtttgtttcattgttgttattggttttgttcctttgtttttggttttgcatttacattctaaaagtacttttgtttctgaacctctgctttccacctgacctgtcctcccagcctgctccttccttcccacttcactttgcctatctctaataggaaactgtaaacagtagtgttgaagaggcacagtgcctggaattgccccaagtagggtggcaatggtgctgtgtgtgtgtatgtgtgtgtgtgtttgtgtgtgtgtatgcctaagtttccttaggtcatcagggttgtgtgtctgcatgcagctactacagaagcctaacatagtaccatacagatacagaaagacagaaattgtttccattctgtggctgtctttctagcatctgacgttttcctttgcctagttaaggaaagtagattgtcggtcatcttttgcacaatcactgactgtgttctgtttcacagctttgaaggacagcaggtttcagctgctgaatttttctagcagtgaactcaaagtgtcactgacgaatgtctcaatctcggatgaagggagatacttctgccagctctacacggaccccccacaggagagttacaccaccatcacagtcctgggtaagacggggttgttagtcccagagccagtggggtggctccggctaccaaatggcttccagtagcaaggaaggggttaagagtgggtctcgctgctgcaacttgttggagggagaatcaccgcccatcttgctgaattttaaaaatagcctattttcccaaatgctctcagggatagcaatcagctgtctgtatagactccacctgctcttgggtttcagccctgaagcttcggaagcaaagatcaacaaagttagagccctcaaaagagtcactcaccacatgaaatggcatcagctttaactaccccgaatttttttttcttctgagcataagaggagaagatgggctcccaaatctacagccacgacaaagctgagctgtcctatgatgatgctccgtctaatgggcatcctcatgtgaatgtggaccatcttattttctttggctctattattctgtcaccctatttattactgatagcccagatcgtcatgctacagagcagaaagtcacacccagggacaccaggttccttgcaaccaggtgcagacgtcaacatgaagcaactgagagcagggaacagcagagaaccattggcaggctgagaggtcgctgccactgattgaccattgtcattagtggtccccagattgggcttttcactgaaatcccggtggccagcgtgataggtttgtgctttgatacggtcagcaggtatttctccgctaaagggtctgagtctgtcacagtttacacaaacgtatactctggttcgtaacagcagctggtcccagggttttggaactgaatgttcaagggcataacactgcagagtgagaccagagctctggtttacaccctcaggaagatgatgaatcaatctatttgaggcagaaggctgtgactttttggtgtaatgatgtgaagattaaagaagaaagatagatataaaggacactttcactgggtgtgtgcacacacatgtatttatgaacatgcatattgagctgcttcctcgttacttcagttaaacacagctgtaacgggaaaaatagttttaattcactaagccaacgtgtgtgcccaaagcctgtgtatatttttgatatgaccaattatgcttttagaaagtcggccctaatgtctggccacacagttcctagcgtggtctgcgtatagctttcatttgtacgtcacttcctgatgcaatctgtagaagatcttcatggaaagttctgggaagagtattttgctattgtgcagatgaactaaacttaccaggaggcccttaaggttttccacttctgcttgtctgcaagtgtgtgaatagacctttgtgaattcaagggtgcgcagtgaccatctaaatttgagctgccatcacttgcaccatctctgcaggagtgacggcagggaaacacgacatacacgtgacagtttgaattttcagagtgatttttactgcctgggctttaggtttcgatcttttaatttcatagaaactctgccaaggttacaaagcacacaataagaattagaaatctaaggacctggggagatagctcagttcgtgaaagaacctgacttcagtccttaggattgagacgtgatagcgtgcttttatagttcacacattaaataggcagggggatggtccctggggtgggtctgcctccctaatctatttagagaatcctgagccactgagagacttgtctgcgtaaacagggtagctagtaccagaggaacaatatctgaggtctcggctccacatagatgcacatgtgcacatggatgtgttgaacatggacatgggaacacacacacccagcaattccatgtttcaggacatttctggagtttaacatttagctttcaggaacacaactttgggaccattattgtcaagacattgctatctgtcagctgtcagtgtctcagtcactgggctgaccagttcaactgtgcaagtaccctgtgcttggagtcagctacccacatgtaggcttctgagtggcatcgtgcctgtaatccatctgaggtctcattattctagaagtaataggtgcctgcttgtatttcattgaagcattaacttaagtgtacttgaaaggaataaaggaatactagtcaatgttctttttgaggatattatgcattcttttaatattcttcccactgaagttactctaggattccttgacagagtaaaattgttgtcatcagtgtgagagtctttcatattctaagatctgacaatttccactgatacacattcaagccttcctcctaaggtttagagttttagattttgtaatgaatggagaatgatggattagcatccctagtgctctgaataggattccatatggacttacatagctgtcaaactcctccataggttgaagatgcacattttagtgcatatgactgttagctatttgacgcattcaacaaaaactttagcataattataagatacaaaaatgactgttaatgttttctatgctattgcattgtgtttaggtctcatccatgtgtaaaccaaaaaccctcctgtgatggtttctgtatgcgttgtgggcctttcattcagtccttccacttgtgacaagttcctgtccttatccacacacatgatataggactctttctattccttatattcctttcttaagaggagatgaacaggagagagaagccactgtgccgagatgaatgcacttactgtaatcgtggctaacattactacagccccatcctcctaagatcagtgctcactcttaaggctccgggaacaggagaacctaattattttaaagggtcttagagtgaggtttcacatactgatcagctttaagtctcctcttttgtggtaattaatgtgactcatcttgatattgcttatttttttctcaatgttgtaggcgtaatgtttataattagcactcttataggcttgaggttagctaacaggtaccttgacattcagggctgtattccccgtgtgtgattttactcagggtttcctctgcgtgctccttctcagacaggtctgtgcttgttcccactgatggctgcaggcagttctgactggctgtttgtatctgtatagtggatcgtgtatatgtgttctctggctagcgacagtttgaattcatttttctagaatggattccatactttacctcttttgtattagaatagacattgtgaaatcaggatggagttaaggagaaaagtgggatagaattaataggccaaaatacattttccttctccaaccttctgttttcgggagggcaagtttaaatcacctgatctatattgtccaattcttcattgctctttaaaagtccaagaaatatagaactctgtgagtggatctagttcaaaggaagtaggggggaaagtccgagagatgtgtctttttagcaccaaaagagatacaaataatcaaaccttacccttgtaactagacagccccactcccacttgctctttcttcctctgatctcagccaagaggagcaacactgctcataactctgagaaaactacttctgggcttggggacatcactgggctactgcttctcaaaatgatgacctcagcgacacgcaagcccattgtgtgtgtacacagggtgtgctttctagcttttggagttttccacacgattcccttggcttaaggtaaagaagatgccagctgcacaggagggtaaccctgggaaccagaattacgcaattacttgaaggtcatagggacagacagtggaccatttacagcagaggtgaagggcacacagctaagaccagcggtggagaaagccagagatgaactttaaccacctgtcaagctttcagccctcaaaccaaagtcgaaagatgttagtcatcttgtctgtcctgtacacctgtctgtttttatcaccttactttgatcctgaactcctccattcccctccccatcttctctcctacccagttccccttccatgtgcctcttacgacaattttattcccccttcaaagtgagattcaagcatctttgcttgtgccttcttcttgcttagattctttggatctgtagagtgtagcatggatatcatattttatggctaatacccacttataagtgagtacataccatgtatgtcctttgggtactgggttacctcactcaggatgatattctcaagatgcatccattttgcctgcaaaattcatgatgcctttgtttttaatagttgaataatattccattgtgtagatggaacacattttctttatccattcttcagttgagggatatctaggttgtttctagtttctggctattacgagtaaaacataattgctcaattataaacataattgaacaagtgtccttgtgagatggtgaagcatcttttgggtataattccatcttacattggtcagagtagctaagatcaaaaactaagatgatagcacttgctggtgagtatgtggaacagagagacactcctcctttgctagtgagaatacaaacttggacaaccactttggaaattaagttgacggtttctcagaaaattgggaatagttctacctcaagatccagctacaccacttctgaacgtatacccaaaagatgttccaccatcccacaaagactcttgctaccaaaagatattctaccatctcacaaagacacttgctcaactctttccttactttgaattagcagacatttttggtgatgtgaaaggaacagacacaatctttaagaccacatagaggcagtaaaagttttcccccacgagctgccactggcgatggttacagtttgaacgtgaattgtctgttaaggctttatgtgttctgggctttttcacgagctgccatgctttgggaaagtggttaggtcccgaggtctcccacctgatcagcatctgtgataatatgataatatgatagcatctgtgagagagtggctggggcctccctgaaagcaatgtccatgggacacacgtccttggagctacatcttcctgctctggcccttctaggtccgttctccttgcttcctttctgccatgacgtgagcagcctcatcctctacttggcttcatcactgtgcagctatgggccccaagacagagcacaggacttctgcaatgatgtgctgaaaggaacagtcacccttaggaaaagtaactcggaaagaaatgagtgggcagggaaggccatgagaggcatccggggaggagttttgatgtatcatcagacctaccatctgatgaaagtgagagaataagcataatatacccaaaacacagagcacagccgacagacagcgtccataccacatgcctctacgacttagtatctgggtggcatctcagctacccctggatctgttcccattaagagagtgcctgcattctgagtgcccatgaccgtgtttctcaggaagtgggagaaatcctccattcagaggaattccagcattgtccgtgtggctttagctgtctgccctctcttgggtccttagtaccatacttggacaatgacattagtgattattgctctcatcaggaaatgcccagtgtgccaacttcaaggaccttttcatccagttgttagttcccctggggacctcaaggccacctcttctcttctgggccctagtttgtctgtgagaatgctctatggcctttgacaccctagtcttctttctccctctctggtgctgtcactttccatgatctttgtcccttaggcttagtgagtggtttccaggacatctggatccaaaggagcatgtctcccttcttcgttgctagcctggtgcccagagttcaagggctgcttattcccagtacctactgtccatggcagtctgtggcccgcctggccatcatttgcacaaataaaccatgtaaaggacacagccaaatcagcccaatttctctgtcaccccctttttgggtctttaaaaattgcatcagatgtacccatctaaactgcatgttaaattgtctcctacttagtttttaaaatgtaagccaggggtatttctttgccacaagtaagtaagtactcatttgggccagaccatgtcagcaagccacctgattgaacaagcgtggacttttttttttttttttcctcatgcaaggggaccagagagcagagtgcctgctccagcagctgccccctccctgctgccacagtgtgccgtcttgctgagaaacacatgcaacaaaccgttttgttttcccccttttcatcagcccctagaagacttttcaatcgctctaattcagtatgaaagtcttcctgtggacagaattttcacattggactggaacagttggaaatcccaaataacatggtttaatcccataatttattgaagccgtatcagagatgtattattcaacttgatggtcaggatggcatgtttatacatatttaatttcttgtttctcttctgagttgagaaacttattaatcataagtctcagccctgtctttgcttattcatggtggccagggctcatattcttagactcacactactgaattctgtattcttactgatttttatttcaggaggctcagtcttgaggtaggacgacacattgtatgaagtttcaccttcaacttagtttcattttttttttaaataaaaaaggtagctttagtcatcaacttcactactgtcacacacagaacctcgattgttgtcagtgtgtcagcccccaagccttttgttttaactactttattacagagatatttaatatgctcatagacaaatgttttaattctgatatctgagggcctttcaagcgcctgggagtctctttctcctttggttcctgagatctgagctttgggactctgagtatggtaaatgcctgcacacacctggcatttcctgtattgtcgagcattcttttcagtgatgctctgcccactagaggacaggcctgtgcctcgacttctttcagtcctggttcagtggagccggctccgaggcgtactttttccatcagtgtttgtggtgagtggttcttctaagggaccccgagctttttatccttgttagtagactttgaagtcttttttttatgaagattgaaatccaagggttgaattcaaggagaattattgctttcaggggcttccaggtaagggcattgatttcaatactgtctgctactcttgattttatatctgtttccttacccattttcttatgatgaatgtctagactgttaatcctcagtcagtgataattcaggaatcggagaggtcactggtgactaactaggagacatttaggaaagacattctgagttaactgatgatgcctgatccaccttacatgacattgtctatccagttcctcccctcctctggcagtttgtcatctggaagtgatcccatcagcagtgtcccttgtctgcctctttattggtaacaatgacactggtccctaaggaagaggagaatctgtccttaaacaggccctgtgcttataaagcatatgtgtttaatttgtagttcctccacgtaacttgatgatcgatatccagaaagacacggcagttgaaggggaggagattgaagtcaactgtactgccatggccagcaagccagcgacgaccatcaggtggttcaaagggaacaaggaactcaaaggtatgatggagaccgcccaggcatgaggcagttagctggccctcaactctatctagcaaggggccctttgcggaaattacaaacagttgcttctgagccaaaactatccattcagatctggtttctaatcaattagcaaaaacatccgaggcggaacggaatgggtttctttgccttctctcatctccaaccctgtgtagttcgagagctggtggtgaaccaaatatgaatgcttcagacaaggaagagcctgtgtcagagatatcctgaagtctgaggctgtttctgtctgtgcctcaaaattctatcatgttttgtggtgacttgatggctcagaaccccacattttcatgctgtgcatttttgtaaagttccaggccattcattctaacatgcatcgcaccgtccttcagctgtaggtatgtgctctcctgcaagaccgttgcattacaaagtaagagcctatgttaattatgaatttacagagatgactttgatggtgaacatgtaattctgatgcccgatttgccatcctagtcttctgcaaagtctctgactttggagtgaccctacaggcagcttttatggccctgggcattttatattgcttatcctgtctctcacggttggcagcctttggctctgtttcttttctaggttgccctgaaagtaatgcctgaacaaaggactctggaactcacctctatttaacagaaatacttagccatgtgcttcagttccctctaaaaaggaaacagtaatactagggtattgttacgaggatcaaatgagtgaatatttacaaagcatcgaggaagtgcctgaagcacagtaagtgctgaaagtgcactcattaaataaataaataaataaataaataagtaaaccgtgcgagtggagtggacgtctttatccagaaaaggagaccagcaaacctccaaaagctcactccgccttaaacccctccttcctaggtatgcctttagaagggaggagttttttatttcccctctgcttctgtctaagtgaattgagccattaaatgtagactgctacgtacaaagcattcacagaaagttaatggtgtgccgtgctttgggagtgctgggtgcaggaagggacggcctaggcctattcactccctccggaagccttctccctccttttctgggcgttcttggacttgtctcccatctggcccaaagccctatgtctttctttgctctaacccactgccactgcatttcttgtggtcttccagaagtctccgagtttaaacatttcaattacaatttcaattagataaatccatttagttacttttcctcttaatcatgggtgataggggtaggcagtgaggcttgtttttgtctccactgctgacggaattacttaggggatttggacttcaccctgggttttcagtggcatgacagccttgtagatatttgaagttctcatggttgtaggagagaaaagcttattttccttcctcctcctaatgccacaggcagccaagtgtcaaaatggttgaactttggactgacttggcaggaaggttcaagatagaagaaatatacataatatatttgaattaaactagtgtgtattgcctagctttggaatatatctggaccactgttacacaaggatgaaagaaggaaactaagggaaatgaccattgtatgaggtctcgggtcccagatcgccctgacctatgacgttgccatcttgttacctaaggtaacactgtcaggggtggggagaaagggaaaggatgatgatctgctttgtctcccgcaggcaaatcagaggtggaggagtggtcggacatgtacactgtgaccagtcagctgatgctgaaggtgcacaaggaggacgacggggtcccggtgatctgccaggtggagcaccctgcggtcactggaaacctgcagacccagcgctatctagaagtgcagtgtgagtagccgagcaccttgttttgaggcctgtgcttggaagctccttcccttgaagtccgcatgcaatctgtatggtgtacgtgggttgttcctctgttgttctggtagaagagtgatcgaaagatcatcctgctgaagggctactgtaataccaagtgccaatgagaacgtgaagatactgcggccaactcaaacatgaagctaaagcagtgccagtctgctttaatgtggcttaaaatcagcatctttccgtgttcactgtcatcattcccgggccaacaaagtcttcagtgattccccctccctctctaatccaccgtaaaccggatgtttacaattttattcccatttcttactaacattttgttctaaggtgcatgttctatgtagctttagttagaaaaaggtgttgaaagttaaagtcgatccgtaattctgcacggtagcgagactgtccctagccatcccctgtaaaccggagaagagggtctccttgtcttctcctccaggtccttctgcttcagaggcagagggtggagggatctttccgtccaaagccgtgctccatccaagactgtgaccacatgaccctctgctctcacttttctccagaagattcctcctgtaggctggcctgtggcggtccaacgatacggtggaatgggtctagtgggtggtggtgtgaggatttgggtgggtgagcagtaattagggatctgattggggaaaggcattgccaactgtgggagttcttatgttagtgccttagggctgccatgtcaattggcaatgtcacagacctgtcccaaaaccacagagatccactcacaattctaaataccaaaggagcaaattgggggcttatttgggccaccttccctccaagaccttagagagtcctttctgcttcttagatggcaagtgctctgcgaattcccccaaggagttagggcagtgcttctcacccttcctagtgctatgacccattatgttcctcatgttgtggtgacccaccaaccataaaattattttcattgctactttataactgtagtttttgctactgttatgaattgtaatatgaatatctgtattttctgacggtcttgggtgacgcttcagagcctattgccagccatcattcaggaggcttgggtgtcacataagacacagtgtcgccgagtttagggcccacccaaatgatccagagttttctcatcttaagatcttcaagactgcacgtgcaaagtgtcttttccaaactaggccatatgcatgggttcttggggcttgaatttgcctttggaagccatttttcagctgctaccctttttattgtgtatttaaattgtccaagtagaacaagttataaacttgcttataagagaccatcttgtcccaacctcttcttgcccttcgagcatggctcaatttacattacagagtgtaggtttttcttgttaattcatttcctctacttcattatatagcttcattaggagcatcatgcttataattttcatatcactaaaactattgtggtgtaatgtccctataatgggaaaacagaaatgatcagatattatctaaattggcagatactagatttcttgtgactttgttaatatgtaattcatttaagcaaacttaatatccattaacgttccttgtaggggcccattagctttaataatacattagctcctttgtgagtcctgagtggatatccacccagtttccacccctaaaccctttaagtagtttcccggagtatcttttaaatagagaatagcccctcccacctacaaaattgcattcactgccaaatgcagaatatttcaagccgtctgcctcctaccctggaaaatgtggtaatgattcctagccttgttttcattttctgtagactcaaaagggatttgtccttcaaggaaagtgaatacaggtttgtatctgaatccatttggctccaatctaacaaaatgctgtgggctcctctcttcaggagaggcactggagcaccttccaaagatgagactgcagctactgatcatttcatcacgacagcctttccctcaactaaaattatataaacattacgttcttgatgcttttaatagatagagagagagagagagatgaaaaacatcttgtataaaggaaggttatacattgcagcactttatataattcagaaagggaattggggggggtctggttttttatcttaattaagactcttggaacttaagaaagtcacctggcccttcagtctatgaatatcattctattcccagaactgtgttgtgcttgtggaatcagccagcaagtcttcgttcccaaccaacatgagtctccttgaacactattagcccttccctatcagaggcctcctgcccccaaggctccggtgccttaggccccaagtccgctctcagtgagtggtgggagcttagctccagtccctcacagcggttctttctctacagccatgcatcgctgtctaagggaaaggataggatccttcatttgtgtagacactgagttactgagatacccagaaggaataacagtgcacttctcccctcctcccctttaagttgactcaagtccctgaagttatcacctttatagggtcactaatccctaaaacctcctttaatatcagtacactggggggtggaggggggtgaattaaatcaatcaccacattttgcttgcaatataaggatttcatctgcccaatagagttctgctgatttcttcaatcactgataagacctattttccttaggccacgttattgtttgaacctgactatggtctgtatgttaaaagccataaaattatgtattttattatgtgatttaatctaaaaaaaattaaatataccattgttctttttaatgtcatctcctttgtaagctaagatttcttcagggtatcatcggggatcaacagaatcaccaggaaatagtgaccccacagccctcacactgtccccagttaggaggctggaggggacattggtctgagtactctttagtagcctcagttgttctcatcctggccaattttggacaaagaaggtttatgggatgagctctctgccccatctaagataaatgcatgtcaccaggccatgagcagagctacgtgactggtggtgaaatcccatacaagctagggcctcctttacaaatggtgttcagagggaaacgaaatttccctcactgtgcccgttgactgtcctacttgaaaggagacagagggagaagccgtgaaaagaaagggaggcatgtacgtcttcccttacgctggaatcctccatgttgcatagtagacaagatttgagctgtgactgggcctggcttcttttgtgtcttgtggattcaagtcctaattaattgaactagtatttgtagtgtttgtttgttagcacctcttatttgtggtaccaggagaaattgttgtgcccaattatgtgaaaaatcagccagatgtgtgtgctgtcatacttttaataacccttaaattttggtgagtacagatattaattgtgtagtatgcattgaagtgattaacatcaatgtaatttatcatctggagatttctgaacataaataaatgagttgttttgttgagcaaggtgttgacccctccagaatcagtgaattaaaagttccccctcctcttttttattataaatatgaaaggcaccacagtcagccaagtgttgagttatttgattttctggggcattagccgctcttgtttgtgacattcccctgttgggtgctcgcttgcaagctcattaataaggttttctcataggaacattgctgggaatgttgtatgaagaacatacagtagggctcttgctttgctagctttcattctgaggcccagcaagggtacagcagcatgcagctaaatgtttaaaacagaaaataattatgttagcaaggtagaattccgagctctgcattcttagaagctacgcagagaacgaacgcttgtgctttttggatctgctgatctggatgaccctaaagtcctcctgtgctgcttttcttcttccccatcttgcaaacgccttgtaggtgtgttacgcagctgtacacggcggctgattagagcagagtgtgattctgtcctaaaactgttagaacagcttcagctctgaaggaatgcgctcctgtcagataacagcctgtttaaacagaccagttcaccgtctgcgtgctagaagaaaactgtctaaatagcatcaaggtggcaacacgtggcgacataagctgggaattcaaagggaagttgtgacctccagtatggaattctgagtgccgagctgaaggaaacaaagccttgctctggacgcaaggcagcctgagctgggattcctgctgtgcgccttccgtcttccccaccagagccttgctctttagaatgttttgcaaaacatcctcattttgttcaggttttgcccatttataaaaagagagaaacaaatgaagagctgagtctagaagggaaaaatgaaaacaaagcttccagaaaccggtattagagcacctccccgcccagattaccacctgacagctaatcacagacatgggcatgactctcaaaatgagttttattgactgggtgtagccaggtattttataaatccatatccccatccatccaaggtctagagaagggtaggtgtctctccctgcatccctacctcccatcccctcaactagaggaaaattgggcattggagagatgatcaaaatttgttctttatctgtgacaaaatgaatgtttctgtgatattgatagtgccctgtggtgatggaggatgaacaacctggaaattgggaactccctcctgtttagactggaggataaagcttcccacagcaggtgcttggctcctccctggctctcccaggttaattctgttcccaggttgtattcttaaagtgaaaacagctgtgttctcaggttgggccagttgctatctggtctctgtgttctgtgtccagcaggctccagtgtgtgtatcaatgagctgggttcagagaggttatctcagtgattattattccttatgagaaacaatcaaggcagagagaccgctgattgaagcccagtttgtaacctagcattctttgtgcaaggccagaccagggacatcttggagttcctggagtttccatggactgtgggtaatggagcccacaggaccaaagcaggcagggttgggcaagttgagaatgatccctgggagaaaggcctttgccttccttagcacagacaacccagtgctgctgcccctgacttagtggataaaagatggctctggtttggtgtacagatccagttcttacatagatagtaagctcgtctcctaatgtacaccctgcctgatggcttttagctcaccataagattctgattctgtgggaaggttaaacgatttcaatttaaaaagaatagtcaaggaaatttcttgatcctatccctagagattccagaaatgccaggtaaccatgccaaaaaatgcaggttcaacagtcaaattacctgggctgctcctcaaacttggggaactggcttgatctccaaaacagacaaacctccagacttaccgtattttgaggctaggacagacttgtgtatttgttactattgtacctagtggattcttagtgggaaatagcattgtctggtgctgctgatgctctcttaagtagagttgttttatgcccgtcttaatcttttatgatagcccctccctcttcaagaagtgtagttggttggttttttattgtcctttcttctttcctttgtttgtttgtttggaggcaaatgtctcactcagtaatccaggctgttatccaactcatggaaatcctcctgcctcagcctcccagctgttggggttacaggtagtgagtataattttaagtgctgcaaaccataccagacaaagacctttaaccttgagagcaaacaaacagctggggaagttgtcactcatgtctcaggacaataggaaggaagcactttacagcctgcccctttcccttctctgggagctctgtggacctgttcccagccaggtgtatgtagtctccttgggtgccctacattgccctcttctcattacaaagctgtcttccccggcactttagacaaccgaattgtaggagctgattttggctttgcgctcaaacagcttctaatacgaaccaaatctcgggttaatctttgcattgttgttctactccacactgcagtaatcctccatgattgacagactcctcagccagccactgcttcctgcaagctccagtgcacagggactgacccagaccctctcctagccagactggtagcagccttaactgatgctgccctgaggggtggggactgaaaacctgagcccttgatctacaggcgtcaaacccacacacagtgtgtttctgaacattagatgaaaatgaaacatggaacttggagatttgcactcaagcccttgtagttacaggtagagattttcatgcaaagcccttgggcctggttatagtagccatgtcaaagaacatttgatgtcagcatgccctgatttagaacttctaggaaaaagagggaaagttgcaggtgcccctgggataatagctctcctgctgaggtatcaggacaccccccctggcttcagttcttctgctctctgccacgtgggaaagatggcatcctagtcaaaggggctggggaccacagacctgatatgctagggtcaggcttctgacaggagcctgcgcgtcttcatttgcataggaaattgacatacagattacagaatcttgagtttcatcttctaagaagatcacagaacagagtgcaaggtcagactggcatgaaatcaattgtaatctgccagcaagccattcagacctctttaagagtttcctttatattttcccctttatagacagagggaaagtacatttaaggaatgtctcatcaaatcagaatgccttcctaaaattatttttttaattggttgctactatagtgtgccctatggcctcctggtatttaaccctctgtgcaactttgactaatgaacaaattttgtcggctgtagcagtcttgctaagtgtattgtagagggtttaagagaaattacagtgtattatgaaaacctcagatctttccacctaattgattggctgttgctgatgccagcgctacaagtgtgatgctccttaagtgcacaggcctaactatttccttatttttttatagagcagttccattttataatgacattaagccattctgagcgatatgtcgctggacagttatcgcacttgggtagaaagtgtcgtctggcttttagccttgcgcctgacgacaccaaccgaggcgtaaaatgatcccccagaaaatgtactaggctttacctcattactcaaagataaaacttggagcctgattctgtttcagagaagatttggtaagttataacatttgatttatgaacataattaaaatataaatggtgagctcttgctctgcagtcaactgtctggatggtttgacattttgccatcctcctatagcagccagggtcttttctgggagcactcaacgcccctgagacatcactggaatccccaggactctgttccacctgctgaagatccttacgttcctcagttagggcagagcaaggagatgagacttgccttcaagtttcctgtcgcctcggggatagatcttagagttcaggccttctgtgtggtttatagggaatgaagacagctcggctgcccatgggcagataatatgccataaatactgagtgtgtctatggaaagggaacttttctatataatacaggcaatattgatgtgcacgtttcctgccagccattaaggtcatgtggcagctgtgtccacacataacgtggtacaagttttcctgggactggaccataatcagagaaaagaaatcagttatcaaaactgaaggtgtagcttttgtggcttaaaatacaaattttaggtgtgacaagcccttcacttattcttcctgattggtgtgtgattgacaactagtacacatgtttaaaaaaaaaaaaaaaaaaatatatatatatatatatatatatatatatatatttaacgaaaacaaactcactggttccagagaggcagggtggactagaactgttcctgctctcttattactaatggaagctgagcatggaaagaccagaatgcattctctggaaatccactcttccagtttgcttgtaaattacacagaggagagaaacaatagaaattttacatgcaggccacaaagcatagaccagcaactccagaccagaaagaaagagcagcaagcacacattagtagcacaaaccaaccagtgcagactaagagagcaagaagcatgctctggcaagcacaggtagcaagtgcagatgagctgctgaagtcagcagggcatgaaaattaacctataaacaaacagtaagtcgctgcccagatttgggctccatgtttatgtcagaagtcccctaagcaagagttcttggatgctttttggtttctgagtgtgaattattagacaggtttttccgttatctgtgtgtcacaacctcgcattcgtttctctttctccttttaaaacacaaatttcatcaaatagctacgtgccaggcagaagaagttgtatcactaaaaataatagtcctgcagtgcactctagggctctgcttggtctgagatatgatctaaacatggttgtccaggagctcttgcttcagccccggagccagagctagctcaaggtcaccctgtttattctatgcaaacatttcctcctttctctgataacatatatcaggatcctcaacatcttcctttgcctgtaagtccaagaaaaggactgtgtcacttggcagtggccatccgggtcttttgtcatctttatgtcctctgacaagtgaatattgttcttcagaaaacagcacctattccagtgggcagtgcacacaggtgggtgttcagggggctcttttaaaaggaccgtaatatcttgtgtgacattgcagaaggcatgtggtagaatcaagactaaagtttcatctggtaacagctgtcctaggcggggtgtcccatgtgatgacttcactgtgcagcggccatagctgcatgaggggtgaggttggcagagcctggccatatttctgtcttctctcgtgttccttaggagcaatactaatgagcccaccactacttgtgaaaggccaaggggctgttgtttaagtggtgggattgtgtgggaaagtaaaactgtggtaattgttttaacttctcagccaactgatgtcctgccctctcacacttggtactcctgggtccgtttgcaaaaatacacatttacagagccacagaattaaatgagaagcataggaaaatatctgattccactcaggttctgtttagaaatgtctttgtgtatctatccatgttgattctaagtacttctgcttccctccctactccctgtggccctccgtcattcatctctggtacccatgcatcccctcgctagcagtcacagctttaagccactgaccgaagtgaaaagaacttgtgtcgcttcctagaatgcacaactctattagaaagatatactctgctttaattgtggactgccattgagaaatgcacttcagaatcagaactctcccccactctattccatggagctgtctggaattgtgttatctctgagaccttcaactagctgcatcattgtatgggtaccaaagttaaaactcttggttattccactatgattgcatggttcctcagataataggctcgggatgaatgtcatttctctttcctctatgtttatgtcaggatagttttatttgggaccacccatctctcctggatcttttcttcataaagcagtttgagtggaattcgggaaacagtttgatagaaagagcatagaagagataacttattaatatgcagtgtcaaaacacattgtcacatggtaatatgtgtgatatatgataaaatatatcaattttgaacaccacaaaaatctgcagcttcacctcagcatgaaggcaaatgagtttcccttagcttgactgagtttagagataaacttcaatgtaacaaaatgtatatcacaggaattgtttgatgtgccacagttggcttatgaatctcttatctattcaaggttcactccttagagttattagtcaatttaatgtgaacaaatgccaggattactaactaattagaaggatgttgctgaaggcacatggatggggacagagtaagagctggcggtgtgggctttgtgacaggatgcgggtctaatctgcctgatgctatcgtttgctaaacactgtgctttgtgttgtcacacagataaaccgcaagtgcatatccagatgacttaccctctgcaaggcctaacccgggaaggggatgcatttgagttaacgtgtgaagccatcgggaagccccagtaagttctgaaggccaaggttggcagagggtcgtgagcagtaaatgtcacaacatgaagatgtgcattcacagctcattggcctgtcacctgtctcccaatgtaaaaaggatgggtgacttttcagaaaatgaagaatattcaatgacaggggaataaatatctgtgattcttagtggttagaattaggagggaatgccttcctagtctaaaattctagtgaattctgtctgtattagtgtcattaacaggatggccagggcaattcattctctctctctctctctctctctctctctcttttggtttttcaagacagggtttctctgtatagctctggctgtcctggaactcactctgtagaccaggctggcctcgaactcagaaatccacctgtctctccctcccaagtgctgggattaaaggcgtgcgccaccactgcctggcggctattttctcttacattaaatttcaacatactgggcctggaaagatggctcagcagttaagagttcttactgctagtgtagaagctctaagtttgcatcccagcaccccagtcaagtggcccacagcaggcatttctctccagctccagggacccaacgtccttttctgacccccacagatacccacatatgtgtgcacacacacaaataaaaatggtctaaaatgtcagtatagtctcagtgcactaggatgtctgctaacagcggtggacttggtacagctggaaggtaaggttttctagactctgatgtgcagaggttgaggccagatgtaaggcaaaagaatttgcttccaagaaaagctcagtactcaactgagagatgcagggatgctcccatgggcgaatgtgactgttctgcctaggagaaagggaggccaacagccttgtgctgctgaggagtgatgctctgcttaccacacagtagtccaacgtgaggcagaagggcagcgtggaccaccactaacacagccaacaagctttgaggctgtgctcccacaagtacctcacagtctccttagacaagaagagagcctttcatctttctagtaaaacaaattatctttaactgtttttaaggggcggggggggggggaatcccaattcacagactgatgaagtggaggacaggtcaagttggaattaaggtcactcaaacttttagtggcaccaaaccagaaaagcagcagtgagctccctctgctgtccctgtggcatgatttctttcttcccctcacagttcaggtaagcggcatcttcctgatttttatataaagaccttagagcatcttcacagcttccctcccagtccttagagagaactcaccctgtgacagctatggagccaaaagtgcactacgtttgagaggagcctggctatggccagtccctttgcctgcttctactctcctttatccaggggctagggccttccctctgctagaggagggagagctctaaagataacctttggagggaggtgggtctggttctgttttgctgcttctctgcggctggtggcttatttgatcccagctttgacagagcagtctttttctcttttaagcccttcaaaaagatccagatcattccttttataaactgatttatgccctaattagaagcttcccttgtctctccaaaatcccatgggtggagggaacccttctcagggcctctgactgtttacagcaactgcattcaaccacctacgtcacatttatgttgtttggattgctaacctatattttgcgtctgtaattttttttctcctgaagaaggtactatgttcgtttgcctgtgccacagggacagtaaattacatgtttccttcaggacatttttgccagagagggtatttgttcgttcctctcaaattggaaagggcatgtggctgtgtgagcaagcaggcattactcggcaactagccctccttgcgtattacctatttattttctcaagaaattgtatacaataaaaatggtaatttaacttgccattaaatgtgtgaatattctcagtgcttacccccactgattgtttcagctgtcaagcagcaggacgcgaggcctgattgccaggcagccccattttccactgcctacaaggaggacatgtgcagtactacctgcaataattcaccgcattctgatgacaaacccttatgcaattaaagagacttgtaacctcccatctcttttgaacagtggaacactacttaacaggccttgcttgagtgtcagggtggcatttacacctgggtccctgcccatgtcgctgctcctaaaggtagtagtagggaccaagagaggaatgctaatgtgttcaggccagtagcatcctacctgtcaaataaaaatcaggactgaggatataagtgtttgcctagcattcatcaggccctgggttccatctctagaatcacacaaccacccaaaagatgattttcagacactctaggtatacctttggttttgtagnnnnnnnnnnnnnnnnnnnntggctatgataagatatgtgtagtattttaagtcactaaaacttgtttttgataagcaagttcccttgttggacctaaagagtctattttaagatgtgttcattcatcattaatccaagagccagatgcactcacagggaaagtccagctatatctggccctagaggagctaatagagagagggccagttactggccaggggcagatagagaaggtagacagagccattcacgtggcatctcaggtggggagagttaggctaaggggagaggaagtgattggatctttcccagaatcaaagctgatttttccaaacacagattaaaaataaagctctgttaaagccagggctgtaatctcagctgctctggaggtaatcaggagactcactgcaatttcaagggtagattggtctccataccaagttacagactagctagggcaaccttgagagcaaatagaaataaaagaaggtcaaggctataacctagcgtagagctagcatatgccagtatccaccagagaaagggacggacaggaggagggctgatccagtgtaaaactcacacgtgccttctgagcaagcaaatgtgcagtgtattagtaaccattgggctgatgcgtgtaccgttagccaagaccttgcttttttttctccctaattattgagatgattaacactgggtgagccctgtcctgcctgagttggtgtgaaaccgcacagctgggcatgtgagttgggcatgttggcttgtttgctgacttactaaaaacgacttagaaatcataagactcctgcttatatcaagtctggaaagtttatcaatagctgattctgatttttaagaattatatggtagacatgtttgcatagccttagttttatgaatttagcatctctctcatgggtccagttacttgcatcaccctgcatggaattcgtttgccgcatgggttaagaaactggataaagataccttagtgggaaatgattctctgacctgtctttcttgcctttccacaggcctgtgatggtaacttgggtgagagtcgatgatgaaatgcctcaacatgccgtactgtctgggccaaacctgttcatcaataacctaaacaaaacagataacggtacttaccgctgtgaggcttccaacatagtgggaaaggctcattcggactatatgctgtatgtatacggtacgtgagaagatacagtgctcgcccactcactcctctgcatgtagctgctgcctgggcttcaccccaaagcctttggtcaagttgaaaaccaaaaaaaaaaaaaaaaaaaaaatcagttggtctccttcaggaacttaaagaagcctggcctgaggtggaccccagtggtccccacctgggtcgacagtgactgttgttctctccctctgatcgtgggggttccccacaagatcatagtctctggtcatgctgagaaggaaggctgtcctcaggcacaggccatagagcttatgttagaagtagtgtctgaaaaattcaaccctaccaattagtggcgttcagccgagaaagtttattcccagtgggttttttcccacgatgcctgggctagccttcctcctgctttgatgagcagagctagcttcttttccacattaagccattaagtccagaagactctgcaagtcagtaaactctccaaagaaatataaggttcttggtttacttgcaaagaccacctacaccttctgttttagacacaaatgccaactttttaaaatatgtcttgttttcttaacatctttctacagggttattaaagcatattactgttaatttcattttggaatcaacagatatatatatggaacacctatggtgctgggtatttcccgtttatatcttgctgttgattttacatactgtgaatatgctctctttagttgagaactacactctctttatagtcttatgctaccaaattgagtctcttctgtccaattgaactctcttcattctacaccaagaaatagtcatgcattggcccaacacaaaatgagtacccagaggcaaaagcaaaatcctaatgttataaatatttgaatatggggaccacgtgtctgccttcatattagctttgtaagcaagccaagttaagttacatgtgtacgaatataggcactgacacatacattatacatatggaataatatttgcactgcactgtctcagaacctgtggatcctcctcatgaaggaagaaaggagagaggtttgaacagagacgcatcctttataccatgcctatatgaatatgaaattataatccttagcctgtacttgaggattctttcccatagcacagtgattctcaaccttcctaatgctgtggccctatttgacagttcctcatgttgtggtgacccccaaccataaagttattttgttgctacttcatattataaattgtaatgatatgtaggatatctgatatgtgaccccaaagaggtcatgacccacaggttgagacccactgcctttacataatgcaaaattaaaagatcctatcaaattcctatattggcaaacgtctagtctttgtccagtctcattagtgatccacagacagctatgttctcctggggagttaaggaaatatacaaatatccttctctgctatatagatgagaaaggacacaaggcacccagttttagctgacaatatgcataactgccctgttgcactgtctggccgggatggaagatacattcctctctgtgctttgcatataccctttccactctgaggcttaagcctcatgggagcaactctgacattagcgcccaagtctatagacatcagtatagctctttttagagactttatccacgttctcccagtctttgatgcactctggagactagattatctggaaaaacaattgagcttacagtacatactattcctacagctcaagaggagaagcatttttgaggccttgttgggcaaacctatttgcataatttggaaaattagcttataaccagcatgtgttgagcgttcccttcatgctgtttctggcgttaacagttttacacactctcatctgatgtccacaacaccaccatgatatgtgcttattttccatcccatttgacatacaatacagtgaagcttcgaaagatcatacagtgtagtctacttcacactgaagactgcttaaggccaccatactgtgaacccaatgcctgctgcaaggttggtctttgcaatcccctgattctcacagattttcaagccaagtctttaaagtgggcctttttagattagcgtcctagatattattacattatttgaaaaccaagtattgtaggagcccacctacttagacaaacacatctgtatacaagtgtatccctgatccaggatgatccatctagcctcctagggattctctatctcttggtccctgctcagagcaccattggaatggcagactagcacactaaactgaagtcttgctagtctagtaacaaaacagtctgacaattagggcagggatgggcagatagtcttttcagagcaatatgctgcgatactgcagcagttttttaagtactcagtgaactaaaagttgacacacttggaaagtgtttaattctctggaagtaatttctctacttgaagcttctgactgtctctagcccaagtcccagttgggtttggtcttctagcatccgtattcccagcacagcttatttagcttcagctctttgtgtttctccctgtttgttgtaatgctgcatgttgatttcagggcctctgcatactgggtaagcactctgatgagctacatcccagcccctcgggcttcttaaatagtggccttgtgctgcccttcttactggaaaggacctcagcaaggatgtttcacccaataatggaatatgactcattcaagatttcctgaaccaggtgtgaaggacaagaattgcctagtagcaatggagatcactgaatgtgtgccatttttgcataaggagagggactgtgccctctccctgacgtctaccccttcattcatctcgtctgccttttggttcataatcatgtcttccgatcacattcacactcattcttactttgtcacaccatcctgagctttgtgccattacatttagaaatgggttgggaaatagcatcggagtgtagcagggccaggcttctgagtggccgttctgcctttcagtggctacactagaattgaaaaccacaggatttgccccctggaagggcaggagatactctggacagtttccttgttgaagaaggaaccagaatctcagtgccagcgagggtctcggggcactcggctcgtctgtttctgagttggcacctgtcatggatgtaactgtgttcaaataagttgcctagtcacaaaacaaacaagcaaacaaacaacgcttccttacttgtggcttctgtaaaccaaagggcagaactgaaatgacgctcacacatcattccatcatcagctaatcctgttctttcaagaagggaatttaaaatttaaatttcatcatttcaccatcctagaatgagattttacatggaattctttttttcttcttcttcttcttcttcttttttttttttttttttttctttttgaggtttgaggctgcaattaaacaagtttaatttgcttgtctccacatcttcaaggagaagtctgtcataaagcagaaccatttgctgttggttcttccttaccaagttcatacaagtatgactgtgtgcgagaagcagtttgtgaaggaaatgaaaacctttgattattgatcaatgatagtcatcattttatgcagactttgcagccaagcaccaaaagagtcatccatcaacttccaggaagttgtcccaaacccagtaaaggtgcaatgtataattaaagttttgatgtattaattagacaatccgagagctcacttgaagataaaaggacaccagatgtgtcagggagaaaaagttgacgtgctttagataaaatttaaaatcaaaagccttcaaatcgtcttatgctctattatagcggaatgattgcttagttcaaagtctcactgacaatttaacatattcagtttgatcatctgggcttagatttttttttctttttttgccctttccttatccccaaataatttttgagacgatggaagatacagtgcaacaagaaccagacagcagcttcctatcaggctcctggtttcgagggtcaaacctcatttatatttagctctcttgtttacaagatggaaaatgtcctttcatttttatcactgtggtccacttaggtcaagcttttaacacaagcaaaggcaacttattaatatttattaggtggaaaaatttattgactttttttaaaaaaataacatctcagtaaaattctcacttgcctggaacctggtactcagtccgcggtggcatcctctcttctttgtacttatggatacagaagtggccttccttcctgctgggatgtattgatggggaataatgaacttagcatttgcagggagcttgtgtgcagtgtcacgttcatccttggctggtacaggccctataaagcagcagccccttctcctctttcctcccatctgtgcagcagaaaggaagggacggtcattgtgctttcttggcaccgaggtgacttagccttgcttttaaggtcaggccgggcaaggggtatccagtgttttagattttcgttcctcacctttctatatctcatttcaattctgattcactctgtaaataagaaagctgttcttcttttcttagctcttgcaactaaggctttagggatagtttcagacctacatcttccaaggagaaaggatttggtggtgtaaagagggaagccattcaacaaacatctcaatgtctccatgcctttgtttgtcattactggtcattgttgtgttcagcattgtgggtttgattttcctttttttttttatccagatccccccacaactatccctcctcccacaacaaccaccaccactaccaccaccaccaccaccaccatccttaccatcatcacaggtatggtaccttcattgccattggaaatgtcctgaatgtttattgtctttttggtataatcaaaaagaagactagctgttccctggaaggcctctgagcttcactgttcctctgctttggaactctagagacacccaatactatgttattgaattgagtcttaaggacccaggaagaacttttaacatctgagctgttagcagatcagatgctgcgcaccttagcatgagggaattctttacgaagcgatcactactcaaagcaaaaacactagaaaaatggcagcctggctactcgcgtggccacagctggtgaaatggtaagtaccatggcctagatcacataatgccttggtctaagcttcatcttaatccccacaaagcaaatatatgcaccaagtttcagaatgtctacgtgggccacatatgtgtcatcctccgtcttgtgacgggtgcctgctggcatggtggctgcacaggccagttgttgcctgagagattgcaggaatcagatggagtcattgtcttttctaagcacttgaatgcaccacctctttatatatattatatatcctccctcctcatcccagtgtccagtggatctcagcggtttgatgtttcatgactggaagccttggagtttcttctggtctagcaagatatgacagtgcatgactataccattccaacacagtgtgccaggcttccttagaccaagcctttcctggcaaccatttccaggtgtccactctaaggaaggaaagacactcttgcaaaagtgacttttccccttaggaacattacccagcaagtgtctgaggtttctttgaaccgtgagtgctgtcattgtgtccctggaccccttgatacccactgaatatctcactgggtgctcttccgtgtttacatccttagcgcccaagatctaacagccacttcctagagtcatgttcatctcctgaagacattttattttccatttgctcaagagttgatgagatgacagaaagcagagtgctctgtgagagagggaggcctcatcacagatactggaatggatggtctaatccagggtttcttcatctttcagctattacactgggacaaagaactgtgccataagccaccactgaggggcttcctaaacactggttacaaacaagtgtgcctatactaaacgtcaacccttctgaaaatccatcaattgattgtggtgtctcgctccaaacctggcttcctctagagaatctgcttcctgagtcttgtctgtttctgcttgagctctctgtcagttccctcggcttcttagtgaactcagtttggagcacagtagaccagtgcctggcatcttctgtatcgttcattggcatatggaagatgttcctcctctgtcagatctccacaaaagctatcctgccaatgcttcatcctgagaatccaattcctcatgtgtctcttatctgattagtaaagctggattgggtgtgtacttattctctcttgtttgcctggcgttgctggtgtggaatccagggcctctagaatgctatgccaggcgagcactatgtagctgagctctatcctccatcctttaggcatgtgcttttcttagcaggtttcatggtttcctctgaaagaccctttggatgtcagactagataaccaagcctcagatatcattagcagtatgttcatcttaggagaagtatgtcacagcctttatatctcccgtagtagaaggttccatctaggtatctgtaagggtttatatctgacgtccataaagccctctcccattctgtgaaaacagccccatttctcatgaatgtagagtgacacttttccagtgtgactggcttcatcacttcagcagctgtccctgactcttccccaccaccacaatccgtctcacaagtcacctgagtcgctctaagtcaccgctcttaatcctccttctcctgtgaggccctcaaacatgtacaactcactgtgatcacagctctgactgcagcgacactgtcagggaagaaattcttagaagaaatggcaccatatttctagccacatcagagaagactttaattggaacatgtctacttctgtctctaccactggcctctcagttcaaaataacttaggatgatctcacaggtgcactttggtctgtgggtgttagcgcttgaatgctttctacaacaccgaatgcatctgtggtaacgaatgcccaggtcttcagcggcacacccaagagtcattaaactaaaattgctactaaaacacgtagtagaatccgtccccttaatggatgtgatctttcaggctgactgtgtcttaacaagccgccttctatatatatttatcttgcccagaaagcaacttgtagaatttaacatttgttcctttctgcagacagattagaggttatggacttgaatggttctctgtcccattttaaaggtccaggctatcttctagatttagattggttcctacagaatattccagacggaatcctgacaaatggatagctaaattaatttccactcctcccctcctgcactgtttggtccgtttacagccaccattagccttaaaagcttcaatagccgaatctagcgacaagaacataaacctggggctctacaaagaaaaagaagcacccgtagtcggctatttctttcctcctagtcaaatgcaataactgaaagccattccctaggtcagagtttcattactagaaaaatgtacaaatgcaatagaaaaatatttttcaagctcaaaaggccctagttgatttctgatttcccctaaagaagcgttgcatagctaccttttatcttccctacccagggtaatggaattgttccctttgttaggaaggcattctgtccccaggcatctggctctcaaaacatactgcagctccctcgtggagatacctgaaggaatcccatacccctccaactcttctttgtccccccatcccccaaaattcttagatttcctgctctcctcagagagcagtggcctctgcctgctgtcctctccgcttgaagcagagctagtgacatgtcagactcaccagaagggtagccctatgtaaggaaatttttctgcagtgtgaagagtattcaggctgagcatggtgttcatacctttaatcccagtgcttgggaggcagaggcaggtagatctctgtgtgttggaggccatccaggtctacataaagaggagagggagggagggagggagggagggacagagagagagagagagagagagagagagagagagagaattcagcatctgnnnnnnnnnnnnnnnnnnnnnnnnnnnnnnnnnnnnnnnnnnnnnnnnnnnnnnnnnnnnnnnnnnnnnnnnnnnnnnnnnnnnnnnnnnnnnnnnnnnnnnnnnnnnnnnnnnnnnnnnnnnnnnnnnnnnnnnnnnnnnnnnnnnnnnnnnnnnnnnnnnnnnnnnnnnnnnnnnnnnnnnnnnnnnnnnnnnnnnnnnnnnnnnnnnnnnnnnnnnnnnnnnnnnnnnnnnnnnnnnnnnnnnnnnnnnnnnnnnnnnnnnnnnnnnnnnnnnnnnnnnnnnnnnnnnnnnnnnnnnnnnnnnnnnnnnnnnnnnnnnnnnnnnnnnntttcagggatggtagcagctcctgtctctgtgcctcagtgcttggagatagcgttagcctcttcccttcttaattgggtcatgcatcccttcctgaaattttcttggaaaagcgttctatgtttctccctttaaagagttatttatttatttattatatataagtacactgtagctgtcttcagacactccagaagagggagtcagatctcgtgatcggatggttgtgagccaccatgtggttgctgggatttgaactcctgaccttcggaagagcagtcgggtgctcttacccactgagccatctcaccagccccctgtttctccctttaattaacctggatattgcattgttcctacctggtggaatcctgacctgtgtgcttggtggagaaagccatgaaaagtactcagcatccagcttccgtcatacacacctctaacagtttagatacaaaacacaggccaggagatgctcaacctgtaagtcacactatacatacagctgccatagattttaaaaataaaaataaaaaataaaataaaaacagccttagagtaagaatgaatagctatagggctagactgtgaaacacatttaaaagtcctctcctcagaacgaagtaggtcatttctaaatgagtttttcctctttttttaaaaagcatgtattcaattaagtattttgaatttcttagaaaagaaaatagcaaggtttctcttattggtgtcaaagcactcaaaagccaatacacttgggacgaagtgactcctaccctcagggccttgtattattggggctttcacagcttgatatcatagactttcttccatgttaatgtgaattagatcgagtacagaaggcatatacagccttttccttcagtggtatttggaaagcatgccagtaggggagctggcaccaagcatgcccatgtcttcactgtaaaggagggacacatgtgacaccaagtcgctggtgtggctgtctaaatagtaacagctttctccacaccgagctctcggttccccagtgattccagccctgagctgctgctgtcggcagggtgcaaaggctataaagctgatctacgtctaggtgtgcatttagcaaagattgagcacccttagtacgtgtagaaaaggactttttaaaccccatcttgtgtggttgagagatgccatgcccctggagtgtttgtgccaaaggcaacaggtgcgacagggcagcatcacagaagtggtctttgctcaatgccatcaaagaatggatagaatgtagatacaaaaataggcatgaagaaccaataatgcttctagcatctctcttcaagacaggtgtatttctgttgcctagagtgagccccccccccctttccctagaaaacacgcatccttcctcctagagtgtttctgagttgcctttttcctgggattgccatccacactccatttagaccgtcttccctcagacactgaacacttatagagcatactgagatcccagtatgcccgaggacaggaatgttattagggcactagttaatatcaatgagcctctttttacctagtctaccacctttgcatgtccatctcttttcatactgtcctgtctacattttcattttgccagtaattgtcaacccactacctgttgcctcatagccaaccatttttgacccatgctggtttagcaaggaacagaagaaagtaagaataccacaaatattaaaagtcatcagactccacctttttttttttttaatggtgaggggtgaaaagtgaggtgagctctgtttattctactacttctatcataattttcctaagtgtacattctttatttaaaacttaatcctggagatagagttccaaccagtgtccatactcagcatctgtcagcgaagcacataagtgagagtagcagggattcggatctcttgggatttcagaagtgaaacctggagttctcccaatggtaggagcatgggaatgaagagctcagtcgtccaggatctcaagagatgagtcttagccttgcagagcccctccctcttctgccctggctaccacccaccctatgtcacccctactttagtccccagtctgctcttcctcccctggcttgtgtcccgacccctcagtcccattcccaaccgcattcagagacaatgccatagggattgttttccttgttaaaggaaaccactctatagattgtgattattgtacagaacatctggtttgcaaacgagaggatctctggggcttgggctgcccggagtgaacaattttgaagaagcttttaacaaaaattgaaactgcttaacagcaaccaggaaaccagctcctcttcccgctgttctggggctcacagtctcgtcactgcacggaaaaggtgacatttaaaagataatctagggctggtgaggtggctccatggctaaagagcttgttcctcaagcgtgaaagcctgggttaggatttccagcactcacagaagagccgggcatggcgggcgctctgtgctcatagtctctgcacttgggagcagagacccagggtccaggagctcacagccttcaggttcagtgagagactctgtctcaaaaaataaggtgaagaagaagaaacagttgaaggcatcctaatgtcaactgcttgtcttcacgtgcacccatgcagggagtatacacacacacacacacaatggctttcttagggcatccagttaaggcctttttagctcagctctgttcttggccactttctccatcattaaggaatgataggttaattaggcagaacataggtggcaaggaaattaattggaaaaccagtagaaaatacagttcaaaacttgaattttccagcacttatttttctctttcaacagatttcaaataaatggagagggggaaggggggagaagaaaacacccatatttaatatatattggcaagcatggcacagctatgaagttaaattgtcaggggaattctttgcctgccctggtgctgagatttaaaacctctccattgcagagactgaagaggaattcaattaagaaagcccgttggttctgtattgactttagttaagaaaataaagtagggaaagtgtattaaaatgtggctaggctgctcgcctcacttccagctaagcttatggctggcaagacagggttgtctgaattccccacagctctagggcaggctgttttttccaggttgtacccacagcattttctagtgtccaccctggtctcacatagccatgtgctgccctacagtgactctatcataacacaagaaccgcacaggtcaattggtaagaaaagtatttaaggttgggaatttaattttgttcttggatttccatttatggcccccgttgtgtttgagaccacggactaatttatggattagttttaagcccccagtctgtcacactcagtgaacaattctaagttggagagaatccatctgaaaggattagaatgaaccactgtgggacttacacatgactgtttcaactaaatattgcccagctgccactcagcaggctgagggttcccccccccacacacacacacacacacacacccttcctcttggctacttggttaaatggctactgtctctaatctcacacattgtcaaagccttcttatttcgtaaatatcttatacctcggcatgaaagatctgtggtggtttcatttgtttgaggcagggtcacattaactgcttgcaggcctctgagcctaagaagagaagtcagctttgaggggaagactgacaagggaagtcagtgcaaggcctgtctcaggcaccttctttggattgtaaactcataaacagctaagaattgcctaggaagatgaggtacccacacagtcttcgtgagaaggggattggctcggttttgtttgtttcatgtatcttttaaaatggtattgtatattattataaaataatatacaatacatttgccctcatcataattaaaactagagagaaaggcataacttggccattttgtatattatcacccagtgcttcccaatcaactttttgtgacctatttttctcataggcctagctcaaagattttttttttaagacaacaaaattagcttttaaaagcctttctgagggcaaccagacactatttttcaagccaattattgcatttataacttcgtttggaaacgtttgcctttgcccacacaattaaaatgttatgaaatactccactgaccacccctgcagctgattcttgagggtgggtttgtgtttttctctacttcctgttgaagacaccctaataaaatgtgcttcatggctttaggctcaccccagagccaagttgtctgtgatgtctgcatggtgtcataatgcaattacaaaggagaattagatcctgtcccagtgtccctgtggggagcacacagtcacttgtaaagtgttttcccttctctcttcacttgaaatagcctctgctcaggttgtataccagatgctctctgagaaagagtcaatagctcccggacacactcctaatcctgatttcagccccgtagccaacctgagttcctgctgcagcccccctcctggtgctgctcatgggtttaccctttccagctgcaataaccatgctgtttgacttgagtatgtgtttgcttaactgttttagagtgttttcctgcaatgtccctttttctcttctgttgggtgcaattgatggatttcgcatccctggagttggggtgcaaaatgcacgatggccgtggctgcatttattgtccggtgcccatgttaagagctgacgcctggcttcacctggtttaattttgtcatgcagctgacataatgccctaatgcaggaagacagtaaattgggatcattggtcaatgctcagatctgactttggaaacttttaactccttgctttcgttttacactaatgatttacctggttcaaaagaaaagaacaatacaaaaatgaaaacaaaacccaagtgcatattagaaacgctaccatgaaaataatgagccaaagcactgattgcttttcgttttctgtttggaaaggggccagtgcctgcccataaactgtattaatgcgtagaaattatacaaatgtgcttttgatcctgcccctcaaatttaaagtttctcacactagtgttggactcagatgtctcaactatggagaggtgtctgtccctttaaggatctagtgtagggtttgtttcaactgcacagttttctgtgccgttcctaccgctatggtaggcacacagacttgacttgtaagtaagtatcgtcctctttgctttatgctttttccctccttcctccactctcaagaaatttagtgcttggttataccaagctgcattggcctcgcagacctctggttaatctggctccttgggagggctctgagttctttatggtaactgggtccctcttgacccagaaagcatgccaattgagggggaacaccggtgtgaattcatgtgtcatatttatacatcagaagctccaggctcattggacccccttcctaaaaaagttctgtttggagtgccagtgcatttaaacattgcctgtgtcaagctgcagagagtccatggaaacaattgccagccagagaactgcatcataaaaagggctgggattacttgtgatttttagccctcactattccacttcaccagcagcagcttctgactagagagggcctggtaggagaaacaccattgaaaactgcagaactgaagaagaaagtaggtcctggtgcgacgacattaagatgaagtttgtcagaagcaccaagtctgaaacaaacatcactgcatatattgttacttatgcaccccacttctgtagctaaaagaaagggcaaacccatgcctcaagtgcctgggggtgggagggaatgttcctgtgaagaaaagccactgccacaacctgataggaacgaacttgaacaacctcaaaaaatgaagacagagacaggccacagcgggagagaacagcattaaagatgatggtggctctgtctcctgacccagccatgacagcagaatcctgacaaccaaacctgggccatggtgcactgagtacttgagactttgaaattcacaagtagtgtttggcagttgtgtgagcatgtgtgttattgtgacaggccttggagatgataacatctggtaaaatggaaggatcagagtgtgagtgagtgagtgagtgagtgtgtgagtgtgtgtgtgtgtgtgtgtgtgtgtgtgtgtgtgtgtgtgtgtgtcttgaacacattcactcccacggcctctccatgaactgaacttgccagctatcttctgatgaaataacaacagtggacggagaacctgaatctgggtgtggcacgttcacctgcaagcatctgagcttcagctggaaaagtatcctcctaagcgtggggttgattgctgtgatgttcacttgctgatggagaggcacggtgccccgccccggggggtggggtggggggcgtggctaacacaaaggcaatgtttgaatgtctgaatccattgtttaactagccttccgactgagcttttctgtcgcagtcctgagctttgatgccttgagaaccatgtagcagtcactgagtttgcactggtgtttctcgtcactttgcatgtgcccctgactattcactcgcaaacgcgtgtgtcctggcaagacccccagaaccaaagagtttactgttttcctccccggctcggctcgcagctttgggctcaaggcatgtcttaaaacagtgcaactcacttcaaatgcttttggcttttcatttattattgcttgtcacgcggtgttctttgaaagcttgctcatatattatctgttccattttttttccattctccctttttttgcatgccgttcctcctgtttcttcccttcctccaatcctctgttcctgtctgtagacaccacggcgacgacagaaccagcagttcacggttggtaccacattactgtttatctactttctcagcgctgctgagaggcaaggcaagcctggggaaaagaaatgcagtcttcaagggaactcatgctccaaatagactgatctcatgaatgcactctagtttttttaacgcttgacattacgctgagtcttgtcatttctgttgtgagttcagtggccagtggttgcagtctgagatgagccctcccctctggtggcaaacggggcaagatgtccatcccatgttcctctgatatataaaactccaccacaccttggaataaaggagccttcaaaaatgttttaattaaaaatgtaaagtgtatttgtctacagagctaggagctgtaggccagcgtgttccaggactcgccagcttttacctcaggattttggaagagagttcttcgtccctcagcgcttgaggcagaggatccaggaggaaaatctctagtttgacccctgacgtggacagagaaagcctgctagtcttctccatagaagtcctgacttttcttacatcctgctgggaatttacccaccccacctccccaggccctctgctcactgccgctccccaagaatgttccccatgcccgtttgaacagcatcaagtaaggttttaaggaagtcttggatgtgtgccacttggcaagccaaatagtaaaaagagcattaagtttctttttagccaaaaggtgattaaaaaacagagtgcatacacttcagacagggacatcagggcactctgcctcctttcccctgtcaccgaaatggggacaagtctgtcaacttttgtttttgtgttttattcagtcagaaaatgagagtcctttttcatcagtgtattattttgctcctcggctcaaatctaactttggcaagacaatacttagagcagatattttagtttaaagggggagtcataactgaatccaagggaatcatttggtaaagggtctgcatcaatcactttatatgctgtgcagagtgaaaagtctgttacttcagtgacaggaggtgatcacagccagccttgtagtcaactcagttgctagaataacatctgtcccacactgactaccgtagataactatgtctgagaacttataagttaggaatttgaataaaacctgttgggcagtgcttggtcaagatcagcagggaaccccttccccctttcctctgctcccttcccctcctcccctcatgcctctcttgcaaagtaacacaagcttaagtaggagacctaacctacccccacttcactgccctttcctgccattgggacaaagggaaatgtccatgcagtaagttagaggggccaggtacactgggcggccatgagaaatcagttaggtatagaatgtgcatctccaaagtagtgtccattagagctaactatatctcaggcagcaactccattatacttagttgttggtatagtggcccatacctttatcctagcacctgggaggcagagtcagatggatctctgtgagttcaaggccagtgtggtctacagaggagccctgtctcaggattggggggtggggggtggggggcgtactttagttgtttgttttacctatagttgagtacctcctgactcttatcgattatcctctgatctttaagttggtttcagtgtagttcaagagattttgttttattctttctaaagtactcttaagttttgggctttctataattagctccagggtcaagtgcattcccaacattcccaaattctctgggctctttaaagaaatagtgaccatttcttccctaaagccccaaagttctatgttttagttcctcgagaaaaaaagaagcacacgcccttgtaggctcatccttaagctcccggacagggcgagcaaactagagaccttgtcctctcgtctaaagtattgaggcatcaactaaaagccaattctgatttggggcaactcatgttaattacgactgtctctttagaaagagaacaaaggagagaggagtctctggacacatggattggcatgattctatagcacactgaccgcaggacatagggttggctgtgccatgagaagcagccgctgtcattctatctggaaacagcatcaagctgggtgtaaagggtgagaccaactggtatgagatgtttgtgggagaaagtagcaaggccatcttccctgtgccctgtattcctcgtgccttcagttggcctgcttagcagcaaacaagtaggtaatccgagctggtccctgtataatgtatttataaatgcattcctcaacttgtctctgatcctcatagcttctcctcaaagggtctcccactgttttaaccagctgactctcaagcccacagccaaaagctctaacaagaactaagataatgcctggaatttaacttgatgaaaagggaagacatttctgagtcagttgtaaagggtaacaatgtggtgagagctacagaccaaggcagcagagcaacaaggccattatatgatagcgtcaattttagcctagtgctagaggctcagctcttcagtacagcaaccacatgacagattcacttgatgacctcaagatggtcctaacagtgacttgtcccagggggggtgggagggggaacaagttaagtggcttgataactcagcaacttaaatgacaagacatcctaagtcagccagctgtgaccatcttagtggtctcaaaagtgttatactgggttttccagatggctgttttctttgatttaaaaaaaaaaaaaaaaaaaaaaaagacattttgaagatttccctttgaagactcattaaactatttgattcaagcttgtgttgctagagtctgtatgaagtttcttctagttgtttctgtatgttgactgtttgttcttaccaataactgattgcaataagcatggactggaaggttggaagtgcatgggcatgaactgagaccaaatggattttctccaaaagaaaaccaagcaacaagtcaccaccgtatgttgttaaggctctcactgagaatacagataaatgtaagaacgagatgttcacgccaggctgacccggggggtctctttgaataagggatcttgagcattgtggttttgtggctcatccttaagggcctgcacagggggaagaaaacacccctgtgttgttgtgtgcatgttgaacgatgcaaaaagaaaaagaaaaaaaagaaaaaaaccactgccaaatcctgatagctcatggccagaagctgcaggcagacatgcatgggtggttaacgcacgggcggggtcgtcgtcattctggttattcggtgtatgggtgtgtgtgatggtttctgtctttctgtttcactgtggacgcttctctgtaaatgtcttgtgccttgttcttttctgttctgtgtgtcccctctccctttccctcccctcccccctgcccccacgaggggtggggtaacagcatgcccacggtctggaatagcgcttgtgcctctgttacactgcagacagctggcttctgggttgggggtctctcctctctctatctgtctgtttgtctatctatctatctatctatttatctatctatctatctatctacctacctacctacctacctaccgatccacctacctatctatctacctcttcccattccccttctcactctcttaattctgcctgccttttctacctgttgagacagtggaggctgacaatcccatggatttccttatctcagattattttttaaatagatttttaactcattccaaaatgaagaacccaatctgaagcatttttcattttctattttggtttcagagtgtttgcccagtgctaggtaacaaaccccccccccccagaccactgccccatgtgtctccctttccctgatttatgactagcgcagaccatgataggatgctagaagcactgtgttctgtccttaccttacttgatattcagttgtggggaagttcttaagcccatttgaaagaagactagccagcagtgcacacggttacaaccgctatgtccaccgtctgtgtatgtgcctctgtgtacatctctctgtatgagtacgtaacagtggcattcaaaggctgtcattcagtcaagggactctgcagaccttgtatgctctacccaagaacaaagctaaagaggtttacgaatggctgcaggacctgaagattgcgttgcagccttgatatgcagtttggaaaccgtttaacggcgtgaaccaaatttctgctaatgggaagaagggaaaaactctccacaaaagctgacaaagcaggaagaacaggatgactgagcttttagattaaaactaccgggggcgtctgaactcttatggctggtggtggaagtatcagtttccacgacatggccaagtgatcagatgcgtgctgcgtaggtaagagagagaccgtcgcctactttgtttttctaatgggagtggcactaggccactgggccaaggttttgcttgctagggattttatttcattgttatttttttttttgtaattttctgtggaatatttacatgatgacctgatgaatcgaaccaaggaacctttttaggtatacttgatttttgcacttatggaaatggctaggatttctgactgattctgattctttggggtctttctcttctggtttaaaattgccatgtcaagaagaaatcacagcttcagaagcacacagtgctgcaccatagcacctgtaacccagaaaagaccaaacaggagtctcggcagaagataccgccactgtgcataaattaaattatcatatctgcaccttaggacttccttaattgctcaaaaaatatcccatatgcaacaaaagtaaactttcatttgtttaacagtttaaagaaatgcactgcatgcattttaattagaagtgactagaaagaacgtgaatagatgataggaaattttgaatagaagaaccaagaagtaatttcccactgactgttcagtcacagtgtttccttttgagaaatattctctgcttcataaaatgcatctttgtcattttctttgagagaatgagaggagtctaatttttaatatgaaagaaaaatacctaagccaaagcaattctaggggtaagttttgtttttccttactgtgcctcgagtgctatggcaaagtcccctaattatatttattcaaaaattatccagctatgacagtgtgctgtagatttcatttaaaacacacacacacacacacacacacacacaaaatcgaactgcaaaaacaaatgtaatgccactgtcctaaatggcttctcggtctggaacataatctaagcaggagattccagatgatttggtctattttaaagtttatgccattaaaaatgacagttttagctctaatgaggtgtatatcaactgtctgtcgcttcttaatggaaaactttgcatatcaatgatacttcataaacatatttgtctttattttttaaaattagctttctagtgccctccccaaggaaacaggtcttcagcagtaaagctgcctacttgaagcgtccttgtttaatgtggttcagtgggcaccaagcacgtatgtagaacactttgatattcatcgggccacgtaagaagtgagggattagccttctgagaactgcaaatttataattaactacaaagaactactttatgttacccatttataacagttattcaaataattgtattcatcagtctttattcaatggataaagccaattagaaatagaaacactttcagccgatcagatttcaggacaaaaggctagcatttctcctcagctgcctgtataatttatcacgttgccacgctccctttagtcacctggttccatagcttgggaacacctgtgaactctgaaggctttcgtgttggtttggcttctgctcgggagcgtttggcatccagggttcatgtgggaaaatgtcctcccctaggagtggcggtggagccacctcctcacgagctcagccagctctccacgttcatgtgtcagtgacctcagaagtctcaagatttaatgaccactcatataaacttgtttagttcatttgatatatgtatatatgcatgaatatatggcaacccgtcagccataatgtattttcagagcactgttttggttgccttaaagctctggtaagtaattcaccaagaatgactctcaaaacattctttcagcaaatacttactgagaatacactttgtgccaagctgcagggagggggaggatacaaaataagcgaaatccgtgtctctccaaagaccttgcagctgaattagatccacaccatcttcaaaatgacagctaaagactataggacagatagtgtgggaatttgagttcctggggcagtaagtcggattgaaggagaacagcaaccaataagcaaagggccccgtgaccaccttaacatgtcctgtgctttaataagcttcagcttccttaaaagatcagcgcaggaaggaggatgaggacatggaagccattgctagctgaacctcgctccgcttagctgggctcctcttcgcctctctcaattcaaatcagagctggtggagaaccatccaagcagaccagcactggggttgactggagtacagtcacctcaagccccactcgattatctcctgacctaactgctttttcagctttgagggttttatttttccagaatgccattgatctataaaattctttttcttaaaaaaaaaaaaaaagggggggggttgtaagtcacctttttctgatgaaggcataacctgtgatctgcatttagcaggtgatggaccattttgacatcatgggatctaagattgtgctaaattaatagtgtactgtgtttgtcagtattggcaaaggatttcaattttcaggaaaatgcaagataaaacttacatacatcagtatgtagcatctaaatacattcatattcaagagacctgtatcagagtgcccacagctaacactccggctttgctttttcctttctgcatgctgttttgagtgagtgatttttaaacattcacccctcatgtttcatgtgctttcaacagtggaggccgaggattccttctgcctcgattgtctatcaataacaaaaaaattacatagttaaagaaatgaacgtatggattaatatattctagctctccaaaaaaagtgagagatagcaagagatttggctcatgttttattttaaaaagacaacaaaaacagaatccctcctcagttcttaagtgttttgtttatgtccctcgaggaatgaaaagaaaaacgatttgtttttacttgtaaggccttactcagttgcccaattccgcagaagaactggacagtgaggatctctcaggtaagggctagtcactaggtaaggcactgcagtgtccaacctgtgggtgactttgtccactgtgacccaatgaccacttggtttgctaagcaatcaatcaatgtggatcctgagactaagaagagaatgaatttgtggagctaactctccttctctgttcactcacccacctttctctcctctggtaacagtgtgtctcgtttcggaccaaggcctgcaccataaatacagtagagagcagagcgccaaggccacctctgctccatgacttgaagtaatgtgttccttcctacatatgtaatggctcaggacaaatttggttgtatcataaagcagttgatgttggattatgtgacacgatctaaagtcatattgactgtcgacttctgtggaatagacgagaaggccacttggaagtagctggtggaagcaggttcgggtgggcagttgttttttcagacaccgggctgtaaactctttatccacctcagaccttttccacagcatagtgagctcttgtgaaagtaggtttcatgcctgactccaggatttaggtgttactaatccagaataagaagcatatcctaaaaaggccggaggaaggagatttaaagtggtcagggctaaacaattatatgagctcccattgatatcatgagacttcagtgccaactgcctacagcttctgaagctctctgattggtcacttagtgaatcagtaagcaagccccttgacattgcattggagaaaccaaagcacacatatggttgcttcctggagaacacaggaaagcaggattccatattggtctttcccaaataatgttctctatagttggtttgaatggctggtactttaggtgccatcttgaacacagctagtactcactcccccccccccccgcaatgtctcagagcacataggatttatccagtcttgtgcttctctcagacctcaggggtgctctcacttttcttctctgtcccatgtgtgagggtgagctgagctgttggagacccccagagtagaagcttccaggaggaggctataggctgggtctgtttcctgctgtgcacctgtcctgcaataagcagccagctaatactttctgaacaaatggacaaattctaagtacttgtgaatttcagtaaatcagttgtttagaaaggaaactacctattagccatgtcattccctcatctcttacttgtgatagatatatttaaagaagttgtaaaagaaaaaaaaaaaaagaaaagaaaccacactaactttactttccttaaaaacaagagtaggcatgtcctacctggcagtaatacaacaccagaagtataaacaaatgcttgcctccccaggtgacagtgggcattgtttctggcaccaccaccccccccccaccgcccctaaacagagcagccctcaggtgcagaccctgcacaactggatctttcaagaatcctgaagttctcctgggttgaccctgatctcctttggcacatattccaggcaaggatccctcagacaggcaaacagaacttcatcctctttaggaaaacacgaatcagccaggtccctcttctcccagcaccatcaattaggggcactgcaggcctcagcctgcccctggttagatgggcccccactgctgctctatcaatcacccgagtcaggagcaataaaccaacaaccttttgtgttcataataatttggttaaattaataattacaccgcccgcccccgccccccattggcgggagtcatgagtcatgcagaacggtgataaaccggcagggcggctggggcagggctgcctttgcatctggtttgatgaactaatcaaaaactgattagcacctttgttcaaaggggatgctgattaatcaattactattgattgtgagcttggcttctccaggcatcgaagagacgtctaaagggagaaaaaacaaccaataaaaattgagcagctgtcatagtgtttaaatttattaaaacaaaatacattattttttatgaagctgtcttgaaatgggtcactgaaggggagcgtattgactgaggaaggatgaacttctcaagtttctgtagcctgcagactgaattcaattataatgcaagacaaacaggttaacacccgccttaaacagcccgtcgataaattagagtaggtgttgcccatttaatgctaaactgtgataatgaataatgttacccactccctgctgtactgggtagagagtccatcctttccacattagggattaatgtttcacactttcagagcttcccctgccctgcccccacctccattccccggtgcctgcctcagttaatgacagtttcataggcagcatatggtatgccgccctcaaccagcaaagcgggatgcccggctgatcctcctttgtaatctgcatttaaacaaaaaaaaaaaaaaaaaaaaaaaagatttggggcctagttcactgatttaattattggccaacttggggggggggggcttatccgattctttttcgaacccttttatttagtttttgggtcttaactttattgactatagatccacactacttttgaattgttttatcaattacatctgctgtttctcggtgacagctggtggttattaccacccatgtggaatagaatagctttaagcatatttatccttctactttattttaaaactttaacaaaaatgtctccaactgcctccctccccgcagcatggaggagcctctgggaactgttcagtggagtgcggtggtaaatagtgtgccagagaatggccctcagcagcggcagggcagcccatccgtcttcagctggggaagcagggcaccaacaaggcattccagcactgctttcttgttactctcaaaatgagagagtgatctggaaaattcctccacgcccttcacacgccacagaaacacgcgggggaggggcaggcttccgcctggcttccctgacccctgcgtaggtgctgggagcaacccagtgacccagctcctggctccccaggtggattacaagagcttgggctttacccccccagccctcatctccagggtgtctcaagcagggtgcagtacatggtggactcatgtgtgcgtgcgtgcattcccgcacaggtgaacgcacttgtgcatacaagcacacacacacagccactcagtaacccttcagttagcaccacaggatgtgtgaccctgctttggaaaacaggctgttggatgtcaggagaaggaaagaaagactctaccattaagcaacgcccctggccctcctatatatcacctaatttcttattacacaaaagcatttgagcacaatgtgcttggttctgggctagcccctactacacagtggtaaagaagacccagtaggagttggagcagccttggatctcacaggctcgtcctgccaccccatgataactttccactggggaacacagactgcttacccaagttgcctgtggctatggagaagtagcaccaagtagtgagagatggagagcaggggcaggaaggcctggtggatgagatgagccacagctgcaggggatcccggagcaatccatgcaggttagttagggagggttgatcataagtgaggaaagcaggcagccataggggcccacgcagtttacaaggacagagtttaaacgtgggtcctccgattcagggtgcccggcctctgagatcaccacagctccctttactcagcagtctcacactcctcctggcccttcttcatccattttagggtgggcatcggggatcatgcagcggaaagctggactctgagcagcctatcagatacacagccatgggtgctaactgacctggaaacactattttaatcactaaatgaagccccttccccttcagaaaagctccatcctgccctgctctggtgtttccagtgcagctgccccatagacttccctaaatgacgacattcatttccccctggggtggccctaaatgccgttataaccaatacttgggaagctccggtctttaaagtttaagttgtgttccctggtgcatacctgtaacatcagtgtttgggggctgaaacagaaggatcttaaggttagtgtaaatcagatctttgagagatctcgggaagcccgtggtcagtgactttcccacaacagaagtttgggtttcctcctaatactgacctttcccataatccaacatgcaactgttttaaccatggagagcaaggtggtcatggccaagtagaccaaacctttccttcagactacaaagtcgctagccacagtgcgaagtgtgagttccagttccacaggttggacactgctttggggtgacttcaccacattcatgattccatctcctcacacccctaaatgcctgaggccccccaaagcatctatagagacagattctagtgggaatgccggttacactctgtcctctttaccaggttcctataaggaaaaccccagtgtcgtcctcggtgcctcccctttgcttaaaacggagaaggcaatcccactgtcagggtcctgttacaggatgaggagtggtccagggtccctctgaagatgctaaacaccttgggattggcacggctccatgaagccatttctgctgatggttaaattaactaaaccaaatggctagagaagggagagacaccaacattttcaaagactggtcctgacttttagctgtggagggtttagcgttgtggttctcaaatggtatacctgaaccataacgtgcatccgatggcctggtgcttccttagtccccatggaaaccagcaaagcctcagctacagcacatgccaattctgtataagtgaaatgacagcttggtccttgttcctaaagagctgacaaacattggcctaggatcagtgatacgaaccaaaaagctcttcctcgggtttttatagagcagactgatgctcagcagacatcaagtcccaccagcctgctctagcccctgacagcaaccctggcagaatctcattggggccagtgtcttagagtaggcgattggcttgcctgaagtcacacagaatagaatgaagttcagcttctgacccaggtctgatggcaaatgggctcctatcccatcccttgtgcctaggcactggcaggcagggagagcctgagtcctggtcactgagagtgcacagcaagtgtctgtgcacagttgtcatttaagtgagcctctgctgagatccagggtacacactgaggacgacctcgggttttctttgcagtggcctcgcacagcccctctaaatgtcggaatagccgcatgccattgctagaatggaacgcagctaatggctgatgctggccgcctggcatgctgtatgggaatcttcatgattttcttgcctccgttgatgccttgccttcccttctctgagaagatggaaagggaaggttatgccgcataaaggctagtgtgctccaatatatattaacatcttaatgggaaagctgtgcatgtactgtatacatttactactctctgacaagagggaattaaatgtcagaaggatttgtagcatctataattgaattggtgctgagaaaagcaaatcttaagagaagaataacatattaggattagcaaacaacgtggcgttttgtcagcgcttgccattcagtgtgttcccctccagtaataaagctgtgcttttaaagcacgagcttagctcggttgccttaggtgagagctaccataggtgatgagactcggtagctttacctttcagatagcgctgtgtgtgtgtgtgtgtgtgtgtgtgtgtgtgagattgtgtgtgtgtgtctgtgtgtgtgtgattgtgtgtatctgtgtgtgtgcctgtgtgtgattgtgtgtgtctgtgtgtatgtgtctgtgtgtgtgtgtgagattgtgtgtgtctgtgtgtgtgtgattgtttgtgtgtgtgtgattgtgtgtatctgtgtgtgtgggtgtgtgattgtgtgtgggtgtctgtgtgtgtgtctgtgtgatttgaggttttgctttgttttacatttttgctttagctttgggatgtggaccaccagcctcccctccctcatccttagcaagaagcagcaagtgacatcacagccattaagccttttctgagatagactaatccgtccagctctaggaagccagaggcagcatttccatcataaacaccaattctaagagtttttaattaaaccgacttgtccagagagacctccgctgcaccaagcgacagaactgttgcaaaatgtcagcctcagctcaggctccagtcacccctgggcaggagaggcctccccggggagggggttgagggaggcttagaagtgccccactttaaatgagactgaaaagaacagatcggtgggtgctagagcagtgtctagcctgccccaaggaagcctgagatgtgaaggtacatcagtgcagttatggccatgatgcctgacactgcatgcttacactccaccttctccaaagcagggactcagtaagtatcctttagattattcaccctgaggttgccatgagggctctgctccgtgagtccctctgccagtccttccttgccaggagcttgtcaagaacatcctagccattccctggttacccatccatccctgctttggcagcacagccagcaaggcttatgccagatccacgatcatggcattctcctggcagttcgtgtgccacatctcctgccaggtggtaaggtagccatagaaacctgccccttcgcagacgcctgatcctcccataggcagcaggggctggggagtgctgtgtgaaggaagtgctccactttggtaagtgtttaaggagtgaatgcaaggagaaaaagtgagagatgaaggggtagagaggacctggaagtccagtctggccttcggagttatccccattcacattgcctttgggtccggtcaactgcagagctgcagaaagctgagcaggttgggacatccctggggttttgatgaaaggatttgtgtttgtttttcattgttttattgttattctgagatgtctaaaatactaaagtcaaggccagggtggttgaagcgatggcggagcgttttgttttgttttgttttgttttgtctcatcttgttgccaacttgacattctgcaagcaacttagaaacctcccctgcaactacgttgtttcagcttcttgccagaagaaaagctaacacacagttataagtaactcatgatgtatccggcacccttggaactacacaagtggtgcaggatggtaccggacagaacaggcaagccagaagttgtaccacaacaacttgtctcgctcagtgttcagtgttgtgcagtttagacttgcatccacctcactcatttatctgaatttgtgtatggaggttgactacacacagaccgtggttacctgaagctagagtgactgtctatgtatatgcatgtaccacgcatgtatttgacattcctctccaggacaacaaggacacacctttatcccaaaatagaaacgtgctaacactggtgaccatatatgaggaagaatcttatcctcttaggaagcaagaaagcaagattgcgcaagccccagagatttccctttgcctgaagttaggctcctttataagagcttacacccctatagtcacttctcacctgagaagctgcagcaatgcaaacagcaaagggcacaggacccacatggatgcatggacttcctcagaggaacaagaccttccactgatggggacggacgcccatggccttcccacctagtaattctcaccttgtgagcaggacaggtgagatggaggctggcagactttaccagggatcctcccaccgtctcctgtttcaatccatcacctgtcagccaagtgcatccctctagcatcgcatgctgctgctctccgtaaccagcaaggtgccagctacaggtacgggtggtgctcacctggtagcaggtgaccagcatcaccccttccactttggaccaatccacagcaccgttggaatctcctcccattcccacaagaagaaataaaagagacagtgagaaacaactgctctccccagggaaaaccagaccatgacaggcacttaggaacagtcacggctcttactacctcccatggtcagccaggggtgggagtggggaggaggagaggtgggaagaggcggcaaggagctcatagccagcagtgttccctgtaaattaaacatcagttaccctctgtgtccatctgctataattgaaggtaggaaaagtgtcttgatgatgaactagcggtggtaaactttctgatcaaagtgaatatagagagattacacatataaataagtatctgaaaagtgtttgtgtgtccttgagggtagggaagagaagtcaaacaggtatttagtgtggactgtgtgcagggggaaatagctagactgagcacatttggagggcacaggtcagatgagtagttgggctcaggtaaggaatcccacagatgtttttacccttgttttgagaaggttcatagtccttccatattcctacccttccccaaagctcaaacataccaccacatctctctggagatggagaaattggtcttttaatagtggacaggaattgcctggctctggtggctggggactgtcttaaacagcttctagagacgtccatgtaccctcatgtcctcttacatggctcctccccctcttccttgcctcatgtagccgttttccctcttctccatcactgtcccaagactaagacactcagagtctgttaaaatacagtcaaacctcaattggtttgaagcaactgaagatgagttgatttcattcccacacaggaaacatagctggcaggttttgctattgctcagtccctgtgagaacatttaggtggttttgtggtaggctgtgtctccacgatgtagagagtgatcctccagcaggcaccgggacccaataccaccctgtgatgcccctccatcagcagcttgactggctttaggatcaccatggaaacacactcaaggatgtatctttgatggtatctccagaaagatttaactgaaaagagagggccaatcctaaatgtggggtggctccgttccatggaccagactccagaccaatagaaagaaaaaagcaagccaaggaccagtgtctgcttcctgcttcctgactggggatgccgtgtgaccagctgccccactcagccctaccaccttccctccctttcatgatggactcagtctttaaaatgggaaccaaagcaagccctccgttacattatttgaggccagtgttttgttcctgaacaagaacagaaattaatgcgcgcgtgcgcatacacacacacacacacacacacacacacacacggtacttcccaacaatgggctgtttcttaaaaggcaaaacgtttccaagatcaccttctgctccgcggaaaggactttgaggacagtagaggctgcattggctgcagtcagcaacacttgggctgagacagaaaggagattcctcacaaccacatctcaagcggagcttattagacacgttgctgaagaggcttgcacatcacggagtagactaattggctgcagcactctgcctccaacccatctctatcctccaattaaactcccatcatcctgttgtccgggcgacctgctgctgcctctgacttggcatttctgttggggtttgaggtttgagttatcctgtagtccttccaaagctaactccatggaacactttaaatactccacgttttaattgaagctctttaattaaagcactttccatagaagccacagttattttgccacatccttccgtgtttagtctccaagcagaattggaaatatcgatagaaagtgtgagccctgcgctcccgctgaaagcgttgtatcaggtttcggctcagaagagtaccattacctttagctgtcacggatctgtacacttgatcgataaacttcaaatattattagaggtggaggcttcagagatttgctctgttctttggagagagacagagataaatctttcttagaaattgacttgaatttgcactctcggtcttcccagtgaaacgcatttctcttaggcatccagcaactacaaggggggcagatttataggccatgtgcttcatgtactgaaagatttaaatggtaaatccttcacatatgacttcacaaatcatgtaaagttaaaagatttttaccgtttctgttgccgctgtgcttaaattgtaaggtacagccagtaaatcattttaatggaggtgtcgtacttgactcaataaaaagaagaaaaaaaaaagacaatggtttagcttctactccaaaatgttaatgtattaatcaacgggagaataattgtttcttactatgttataaatctcaggtgccattaggatttcagcaaagggtgatgtagccaccacattcctaaattacagttgtttaccctgccatgcttccatcctgcatcaccatagctcattctgggttcattctgaagttgttccccagccaaagagccaaaggggacaccctgagggagtgaagcttataagagaaaactaattacattttgaggggttaaataacatcaaaactgtctgtggtgaggagcaagcatccctttccaccatagttttctctctttttcttttttttttttcctttttttttaaaaattaggtttttagatcttaaatcgaggctctctccttcctcatacctttaagtgtggctggcatattatatgcctctagtcctcacaagcctgccttccttccctttgcgagttcttctaaggaagtgagctgtgggtcttctgtcgttccctcccctgcccccagttcctgtgatagcctgagggttccttccgtgatgtccataaatagttaggccaccctccttaattattaggagccagaagtcccaggatgtgtacagtgggcactaagaataggttcaaacaggcagaatccagcaccttccctccnnnnnnnnnnnnnnnnnnnnccccccccccccatgcagtagcactcctgtgctgcctctaatgaaatggccttgcgggggagaacagatcaattccggactggtcaggtcagtctgttccctccgtgtaacttgatccatctggtttgttctctctgactcctccattaaaaaaaggaaggtgttcttctgaccctggaggcagtgtccctggggcccttggtgtcttgtcatccgttctacatccctgttcctcttctgatttcaacagattctcgagcaggtgaagaggggaccattggggcagtggaccacgcagtgattggtggcgtcgtagccgtggtggtgtttgccatgctatgcttgctcatcattctgggccgctattttgccagacataaaggtaagcagggttctctggcaggctggagcaacatgtcaccacagccctggctctgggggggcttcactgctggcattatagtaggcagtttggtgtaaaggacggcacagcctatatggtttctaaatcagagagaaggggattggggcgggtggagaaaccttagccacggctgctgaggactctgggaggatttcgattccctctgaatacaaagcggtataagtctgcggttctccagtctacatttgggagtcaaaatggtaaggtcagggctggcgtgacaaggagcctgagccctggaaggttgtgtatgcatggcaagcatagccacagcctgctcgcttcccaggagacaggaggacccatttgctgcccctgaactctgagtaagctggtccccagagccagaatatttccctctcgatgtgatatgcctgggctttgttggttttttttttttaatcctttgccttaaaagccacataaatatgtattttttaaattatcggggcaattgatttaaattgccattaatcatcacacttaccaactgtgcagactggatgggcaatcatctttgccgatgctcttcctctctgcctcatgctgctctgggcctcttctcccctcctggtaatttagtctttcttttctctgtcggcccttgtctttctctctcggttgtttttctcaagcattgtgcactgagctttggggcannnnnnnnnnnnnnnnnnnnggggcagagggggagggaggtgtagatgcttgcatacagcttgattgttacttgggtttggcgaaaggtccctggagcccagcagtggaggtccagggtacttaataaaagcctttaggatccagaagtgtctgtctgaagcatggaacagttggggagccctggagctatgtgggtcagaacctctgccgttcagtgcttagcttggtaaagccagagagtggagcagagtgtgcacagcatctgtggaggatcaggggaaggggatacacgtgcaagcgctctctgcaagagagaacatagcaagggaacacttgaccacctgcttgctcagtttatcactttaagatctgagagttcggcaaaatgtcttaggctttttttttaagtataagaatcgttaaagtcagatcataatggtaagtggatgatcagattcccccaggcagtttgagttctacctgcctgctactccaaggtgaagtcttgtctctctccatgtaaacgtttgggatttggtgatagaaatgtcaccaacttggttaatgttctgtctattgtcattataaagtggctgtgacaattagcaaatccatgaatccgggtccaggctccagtcaggtggtgagaaagaatcccttgctcatgaagacagagcccaagcctccattgcagcccttaaaatgtcaaatcacctgctctgcctggagcccctctctgaatcggaaggcacaggggaaacagcccttacccagcgcatcacagtctccccgtgggtagccagtagcgattcatgaagccaggagactatggttggagtaactggttcaagatggcagtagaagcatctttggggccctaattcatttattggctaattgctcttccttgctttggtctttaaccatgtgcgaacatttcttgtcatcggtctttggtgttcactgttaattcggtagtcagcagctctccagctttctgcattttagccccactcacgccttcttctctggtcataatcactgctctaatgtctcgtttgctgaattacatcgcagcggctcagttggagtggttacctttggagcccgggattcccatctgtctcacccaccctgctctcttcttcctattgttttttcccccctctgctgcctgcacaccacttcggctgatgatggccataaagcaacttgccatctctgtaccacttctcacagaggccaccagagagtcacagtgctttaccccttcatctttcaggtacatacttcactcatgaagccaaaggagccgatgacgcagcagacgcagacacagctataatcaatgcagaaggaggacagaacaactccgaagaaaagaaagagtacttcatctagatcagcctttttgttccaatgaggtgtccaactggcctgtttagatgataaagagacagtgatactggaactttcgagaagctcgtgtggttttttgttttgttttgtttttttatgagtgggtggagagatgcgagactgggaaggcttgggatttgcaatgtacaaacaaaaacaaagaatgttctttgaaagtacactctgctgtttgacacctctttttaatctggttttaatttgctttgggttttgggtttttttggttttttgtttttttcatttatatttcttcctaccaagtcaaacttgggtacttggatttggtttcggtagattgcagaaaattctgtgccttgtttttcattcgtttgttgtgtttcttccctcttgcccatttatttttcccaaaatcaaatttgtttttttccccctcccaaacctcccattttttggaattgacctgctggaattcctaagactttctccctgttgccagtttcttttatttgtgttaacggtgactgctttctgttccaaattcagtttcataaaaggaaaaccagcacaatttagatttcatagttcagaatttagtgtctccatgatgcatccttctctgttgttgtaaagatttgggtgaagaaaaaaaaaaaaaaaagaaaaaaaagaaaaaaaaaagaaaacactgaaaactctttgctgctgcccatgtcttaaatacgtagagcagcgaagactagaaacgtagactgtgacccagacgctgtcgtctgctgtggatcttcattactgtacagggttatctgcaagtgaggtgtgtcgcaatgagattgaatctgtcgttaattctttatctgtaggcggctcagtatagattaccccacgctgtgcagaaagtttttggagtggaaaggtctcctccttcctcgttgccctaaacagacccgacatgtgaggtctgtctgttttatgtaagtggacaaatttgagatgtcacaggaggggaagcagggagggggtacgacagttctgctctgattatttctactctcaacaattccatccacctttcccaattggccttactgctcactaatgcaggagagagcaagtccgtgtgccgcgtgactgactggaggggacaggctttgtttaggtttcttttacccccactttggttttggttctgggttgttttgctttgttttgttttcctttgttcttattaaggacggcagtgggctgtgtcctgtgtgtactgtatgttacagacaccgtcctgctgggacacttgtcctgctgggattcccagctcccacccccagctcctctcattccttcagatttggcttgacaaaggcaggaggtacaaaagaagggccaattttgttctggaaaggtcagagcccagagtcgaggtgggaaagtggcatatagggatttccagttacttaatcaaaactcaaaacgtgagtgtttctgtctttcgtgcactaggcctggcctcttacctcagccttaagaaccatctgccaaaaactcctcatctcgcatgatggcagccagagcgcatagctactaaaataagtttccgtgaacatatcttacaccggagcctgaggaaagatagaggcgcaaaggaaccctttgcattctctaaagctaagtgggggtttgcagaagtgctggggtcatctagcagtagttctgaaggacagaacctaaactcttaccacatgtgtcggtaagctccagactccaaaacagcccctctggaaagatggcatcagaaaagatagatctatctatatatataaatatataaatatatattatatataacattttcagtcagtacttttggattttgcaaggtgcatttttactattgttacattatgtgggaaacctacgctgatttatttaaggggaaaaaagtgtcgactctgttctttgaaagcgtatttctttttcttgtctttattttaacttctgatagaaccactgcaatatgggggccttttgggaacggactggtttgtaaaggaaaattcattatggagcagtgttttgttaacccctctcctgcccctaggcacttaaccaagacaaaaagccacaaggaacatccctttttcaaaaattttataatgtgcatctattccgagcccttagcacccatcctgaccatagtgaccatatcaaagggtgacaaccagttagcatgtcgttgaaagggtttttcagctgttctttttagaaaaaaaaatatataaaaaatatttaaaaaaaaaacaaaaaacaaacaaacacaaaaaaactaccattgttcacagaattggcatctcattttcgggaccgcccatctttctgttttgacaagtgtacagtagtgcagtgttctgatgtaactttatggcttacaatgttgacatgtctcaggttcctgtgtttcaattggtgtttttccgtctcaggtagattgcaaagtgtaggccccacacattggaaaaataataataataataaataataataataataataataaaacaaagcaaaaacaggaaattatggattttagttgtatattggtttatgtatttttcttaagtatacagtgcactgtttgaaatgtattgttgagtattactttgtacaggttgatcactttttttagagtgaagaaagaacaaacttgggttttttttgtgttttttttaaaggagtataaaataatgaaggatgtataattgatgccaaataagcttgttctttagtcacgatgacgtcttgtttttccctctaggccagttctgtttctaaggtgtacaaggaccatgttacagtgtaagaaactccacatccgtgtgttcccattcgcattttgtatcggttcatgtataccatttttacaaaaagaaaaaagaaaaaaaaagaagtactataaaatatctgtcttcttaataaaaaaattaatgttacaagtgatcctttaaatctctttctggattcttaaaacacacggcctctggtcccagcttcctctcctaggaccttgtgtggggcccagagcactggtggctgggaagtggctgcgagctgggtctctctctctctatctatctctatctctatctctttctccttctcacccttatcctatcctcttccaccctcagagtagacaggagaatccggtgttcggctgaacagagttgcctgcagtaggcgcggtgctttgtgcaggtgtgcgaagcacagttgcccgggaaggcgcctcctgtggatatggccaccaccaccctccccgcctccacccaccacccactcacttccctgttttgcctgctccacctgcctttttctttgggagtctgagtcttaacaattcatactgccttcttccttttaaagttctctccttttacaaaatgaagagatgcgctgctgggtcggctgcctgcggattgctctcacttaccgtttaggtcttggagacttcaggcccgggtagacttggagagccagcagcatggaatcaccatccttgccttgcaggcgaagttagcaatgaccacacttgttgtccacgagcacaaacctggccacccctaagtgccctttctcaccgttcacccagctctcgctgagtcccccctctgtctgtcaggtaaccaggaaggtgtggcagggagagacaaggtaagctccaggaaagacaaaggccgggcatctcatttggggtttttaacatcatggtctggtctctggtctgtctctcgagcaaaacatcaccaacagaatcagttatgcagtcactaaatgtctggcacatcgacactgtggggctgtgggggacaccgatatctgtaagtggccacaagaaactaaggtaccagttacctcagtgaagtgacctcggtggtaattgccacaccccgggcaataatacagaccagtagggatttcttggggaagggggataaacagaagctggcaagcttgctcagtggaagaggcaggagcctggtcaggtttccaaggacattagagaagaaaagtgacttaggtgcagagggcagtgcacccaggcagcaggtggccatgtgaggagtgacacgctcatgaatggcgtccatcctgtgcccatcctcatagtctaggcagaactaagggaatccattggcctctccggcttttgccagagagcaaagatgaacagggaagatgatctaccatatctctataggacaagggcaacttaggatagcacttgagagccaaagtagacccatcttggttttagataactgccccacctttactagcagtgaagcctccggcatgttacccaaggcacctgatctttgtcttttgttgggtgaggcaagattatacgttataacctcagagatcattagaggacagagaatagatagatacacagtcctgggctgggagttcaaattagtgacaaagcaagcatgaggtcttgagttccatcgtcagcacaccagaacgatgataaactggtgcttaggcagtataggtgcagataggaagtaagcactcattacatgttgatttagaaggacaaggttgcctgtggctataagaactggccactccttggagaaaactatctgtgtggactcttcatgcctttgtgaatttttgcatagactatttaaggacttcctcatcatggttcatcaatatacttatttgtagttactctgagccacatggcatgctgtacgtgcgatatccttacccatctccttgcctataacatgaggttccaggttcaacctcagcccacagagcagcgaccctgctggtcatcaaactgaggcaaatattgggtggtagcttggctcttgaagcacagtagggcatgcaaatgagaaggagcctcaagccactgagttactacacagtggatatgtttcctgggtccctcttagtataacacaaaaaatatagtccttgcttcctctagaggactctcgaaaatgtttggcctgattgtgttctccaaatacatcaactggaaccccaaggtggtatccaggtgttaattggtgcaatctttcattgtcccctatctagttgcaatgttacttttataccatgggcttgctctatagagagctgttcctcggagtctgtcatccagacccttaaagcagtcaccacaagaccctccttaagtaagacatttctgttgtgttataaaatgtggcctcagattcctaacgcacctgtttgccaagataccacaaatatttaatcataaagtcatattccttcagtggcttccatactttcacagatagttcagggggaaaaaaaaaaaactccaaaatgacctgaccccattgcacagcttatgggagaagagttcttcactattgtccagacaggctcacagccactctgacagagtgtgtagcagggcttaaagggccagcagtcaagtgctggttgcctgactcaactttgtagtttcagtctctatttcaagctttgactatgcaggcccatccttaactaggtagctcgttgtgaggccttgaagaggtgtgcctgtgcacaccaagtttagcatccttgatccgcctgtctctgagacctgctagcactggtatacatggtcctcctttgggggaggatgatctttttggtaatggctgtaaggtaatattggcatgtatcaccagggcccttcagagtgaagttccacaggttagaacaattcaaagtaagccctgccttatttctcctcatatagaaatgctaaagtatatctctagtagaagctgtgggatgctggagtcccgcaccgtcttacctggttatgaaggagggtatgggcaccaagataagagcaccccaaagtccagacctgaacatctaatgctttcgagtcttactgatatcagcatccaggctcttttgcagaataggaaacggcatgctttcttttaagggtgatgttttgtttgcttgtttgcttgcttaggagttttgtttttgcttttcatgtaaatcccctggtggccagtgtgagaactacaagtcttggttatctaaatgcagatagaattaatttcaagactactgccttttctctgcgcacactcaatgcactacgcgcttgcttgcgtgcgtgcacacacacacacacacacacacacacagcctgcctttgctccctcctaatccttaaagtattgggttggggagtcaggaccactacaaaggagcaaagcaacccacaccctgggccaagacctctccggctgtcctccatacatattctggctcacgctcatatttcagacatgcctgccttaaatcttccttaagtgctatcttctcaggttaattaatcaccaggcttaaacttgctgttaccagcaggaagtccatcctgaagtcagcaatgttacgattgcatcttctaatactgtttatcctgcattagtgtttacttagggggaaaattgatccgtaattgatatttcagtcttccagagctggtgttggaagagtctaatgcaagcctttaatagcaagcaaatatttaaatcccttaatggttgctggatattgaaatgtgtgactttattactcttttcggtttgttttctctgtagttgtgtatttcatcccttaaacttgcaacggatgctggcaggctccagtctagccaatccacaagagctgtctgcccagacacagcagtcctgattaaaaagtattactatggatgggggtcttctacactaatcagtctctgttagctagtgacgaaatgctatccatctctctctctctctctctttctctccctctctctaggcctgttttctctaacctcctctcccagaataaagtgatgggggcagctatagtgtcgcagttaggagcatgaatcttttatcgtttggacaaggaaggggaaatgccattactgtcaactgaaatgtcctacttgggttttttgctcctgcttcgctgccaaagcccattgctgctgctcacagctgttcttgatggcttgatccttaacacagccagaaatgtagccgggagacacttaagacagtttatggaaaataatagatttccttgcagagacaccaaagcctcgagaaggatctggattcgcgttagacccagccaagatcaccagttctccccctttctggcctcagttacaaagcctcatgctcagaaaggagcaggccctcttgaattctgttttcctggttggtttctatccacacccgcaagtctctgcctctggagccctttgtctcagcactcgcctgcagccacctgagagaagaaacagtatctccacacatggacagaaaagatgctgcaatgtggaaaagaagtcccaggaaagccagccaaggtgagctgagactcacctcaccagcctgggtgccccagagacagaaggcggctatcagtgccctctcagcatagggttgggatccttccttacccatgtggccaatcaggaatgccaagaaggcatagttagctctgctcccttcagctatgcaaccccatcaccttgccaactctcaggcagcccttagttagaagtctctgggatggacgttcccttgggcagcccagaagggagaggcttcaaatactgggaaaatacttgcaaaaaaaattaaataaaaattttaaaaatatatattgggaaagctgcaagaaggacaagaccccagacttgcagcttccggactattgatgcaaattcaggtcaaaagccatgggtcccctactgtgcctggaagtgaaggtagaggggtgtgaccagcgggcaccagcctatctctctcccttttcctctctctcattgtgatagcaagcagcccctgctcggtgccaccactccccactgttttattctcagctcctcctaaatggaaaccattaatcatactaaattgtgcaatgattccacgatagggagaatgctgatggcaaaaatcactctcctttgttgtgccaggcaggcaaaaggcagaagtattcgtttgtctttttgcgagagcctggttccttgcaagtgctgaccatgtgtttgcccaggcagctgcctctatgtgcacagtttattttagcatccggctaaggcaccccaactgttgacagaaaacaaggctcctaagcctcctccccctcatcccaaggactgtcaggaatacttaaatctgtgggtgccctcacccaaggtctttcccatctcaaggtcctcagattgggggagagcttaaatgacagtggtgagaatcccaaaggtggtnnnnnnnnnnnnnnnnnnnntcccacccccacttctgccagctggattgtggagaagccaggtgtgggtaccaaggaggcttttttttttttccttttcagaatttgatgtctgcttcgctttcgacagcctctttgtaagccaccccttctgaattagaatcattttccgaaagctcttaagctatgattaatgccagggctgtttttaacaatcatcctgccagtcttaagctgtagtcattttcaataatttggagcgctcaaaggcgagccaggagtttgttgacaacaaaacccagaagagcacagtcaggcagccacaaaagatgggaaagcaaagggaccacttgggcttagctggctttctgctcctagagtttcactgctaaaagtttgatggaacactcacaatgcattaaggatccaaccgtgaacatggctgggcaagaggaatgccagcctggcttttgtgctaacaaacgggcagcgtgtttggagggcttctggtttatttatggacacgtgtggttcattcataccgtccccaaaccaaagagccttcatttgtcttccttctgccaaccttgaagaccgaaagagaagcaccatccccctgctctggagactgttggcttctcacgaatgctgaacaggtctctggttaggagttgggggaaccaatgtgtgccgggccatgtgtgagaaatgagcactctctttttgatcttggcaacttcattcaagagtgtccaccttttctgaagcccggacccaaagaagccggggcaaaaggcagtatgatctcaggtctacctagctcaggtctacctagctcagacttccacagtacttggttttagttcattgctctctccagtaggaaagtatctgctctgggtgatgcatttcaacccagtgagttaggtgtgattggtagataggtgtgcctcagtttaaccccgcccgcagggtgtatagccagtgagtaggctcccaacagagctggggatgttcgtgagctgattctcaagacttatttcaaccaggactagcagcctggtcccagtccctctcccagaatgagccttcaagaggctttcctcggaggcaggagtgaatagtccctggtttctgggactatgtttctgttttggctagtgctactctaaaaggtatcaaaatctcccagggacattccaacacctagtaagagtttttggtaggggttcctggcaagttttcagtggacactgtctttctgtaggtatcctaccaggggtcctgagcctttggggaaatggtatttcccccgagagtacgtcttcccttgtatcccctgcctctgtgcattgcatcagccactcccccaatctagagacgtcattctcccttttccctgtccgtctctcacctccaagacttaccagcccctggccattgtcctcgaaatgctcctcaaactccacctaaccttgttatttgcatgtcaccaaccctgcccgccccatgccccctcaacccaaagaatgtgaaagcctctccctggcttcccatctctgtccactaccccatcactagacccgatgacccgctctaggtccctcctctgctcaggcaaggctcctgctagtctttgggtttaccatcaacactcacatgccttcccctcgctctggccctcagtcctgctccatgacccccagctacatgttctatgcacccagaccacttcagcagccttcccacctctgtgccttggaaaatgagggaggagggaggggcgagggaggggagatcgagtccctcctgcgggctgattcaggatctgtcccttcgccttttcaatccctcattcttacctcaagttctgtccttatctcatatctggtctatttacttttctgtctctcccaagtcaaaaagtaaactccctgaaggtagacacagatcctgctcccaactccaaagccagtcctggctctgtgctcgaaaatcattggatgatgagagactatatgtgattggataataagagaccatctatgattggatgggtctccctgcctgcttcttttctggaaataggcaggtacagcttgttccctccttcttagccagacattctaaaacatttgcaactcctcctgtgtgctttgatgaatttgaattttgtttcttcttatcatggtcaaagttgtggggtgtttccgtttgtttgttttgtctttcccctgctgccctgttatcactctaggctggttcatccataaacgcaatgcactgaagtccataagta

SEQ ID NO: 144 - DNA, 1837 bp, Mus musculus
gaatctgtttactaaagacgtgacagtgattgaaggagaagtggcaaccatcagctgccaggtcaataagagtgacgactcagtgatccagctcctgaaccccaacaggcagaccatttacttcagggacttcaggcctttgaaggacagcaggtttcagctgctgaatttttctagcagtgaactcaaagtgtcactgacgaatgtctcaatctcggatgaagggagatacttctgccagctctacacggaccccccacaggagagttacaccaccatcacagtcctggttcctccacgtaacttgatgatcgatatccagaaagacacggcagttgaaggggaggagattgaagtcaactgtactgccatggccagcaagccagcgacgaccatcaggtggttcaaagggaacaaggaactcaaaggcaaatcagaggtggaggagtggtcggacatgtacactgtgaccagtcagctgatgctgaaggtgcacaaggaggacgacggggtcccggtgatctgccaggtggagcaccctgcggtcactggaaacctgcagacccagcgctatctagaagtgcagtataaaccgcaagtgcatatccagatgacttaccctctgcaaggcctaacccgggaaggggatgcatttgagttaacgtgtgaagccatcgggaagccccagcctgtgatggtaacttgggtgagagtcgatgatgaaatgcctcaacatgccgtactgtctgggccaaacctgttcatcaataacctaaacaaaacagataacggtacttaccgctgtgaggcttccaacatagtgggaaaggctcattcggactatatgctgtatgtatacgatccccccacaactatccctcctcccacaacaaccaccaccactaccaccaccaccaccaccaccatccttaccatcatcacagattctcgagcaggtgaagaggggaccattggggcagtggaccacgcagtgattggtggcgtcgtagccgtggtggtgtttgccatgctatgcttgctcatcattctgggccgctattttgccagacataaaggtacatacttcactcatgaagccaaaggagccgatgacgcagcagacgcagacacagctataatcaatgcagaaggaggacagaacaactccgaagaaaagaaagagtacttcatctagatcagcctttttgttccaatgaggtgtccaactggcctgtttagatgataaagagacagtgatactggaactttcgagaagctcgtgtggttttttgttttgttttgtttttttatgagtgggtggagagatgcgagactgggaaggcttgggatttgcaatgtacaaacaaaaacaaagaatgttctttgaaagtacactctgctgtttgacacctctttttaatctggttttaatttgctttgggttttgggtttttttggttttttgtttttttcatttatatttcttcctaccaagtcaaacttgggtacttggatttggtttcggtagattgcagaaaattctgtgccttgtttttcattcgtttgttgtgtttcttccctcttgcccatttatttttcccaaaatcaaatttgtttttttccccctcccaaacctcccattttttggaattgacctgctggaattcctaagactttctccctgttgccagtttcttttatttgtgttaacggtgactgctttctgttccaaattcagtttcataaaaggaaaaccagcacaatttagatttcatagttcagaatttagtgtctccatgatgcatccttctctgttgttgtaaagatttgggtgaag

SEQ ID NO: 145 - protein, 393 aa, Mus musculus
NLFTKDVTVIEGEVATISCQVNKSDDSVIQLLNPNRQTIYFRDFRPLKDSRFQLLNFSSSELKVSLTNVSISDEGRYFCQLYTDPPQESYTTITVLVPPRNLMIDIQKDTAVEGEEIEVNCTAMASKPATTIRWFKGNKELKGKSEVEEWSDMYTVTSQLMLKVHKEDDGVPVICQVEHPAVTGNLQTQRYLEVQYKPQVHIQMTYPLQGLTREGDAFELTCEAIGKPQPVMVTWVRVDDEMPQHAVLSGPNLFINNLNKTDNGYCENIVGKAHSDYMLYVYDPPTTIPPPTTTTTTTTTTTTTILTIITDSRAGEEGTIGAVDHAVIGGVVAVVVFAMLCLLIILGRYFARHKGTYFTHEAKGADDAADADTAIINAEGGQNNSEEKKEYFI

SEQ ID NO: 146 - DNA, 350570 bp, Homo sapiens
  misc_feature (1)...(350570): n = A,T,C or G
tattagaagcttctcatatatagccttgagctataagttaacttttcacagatcttgcctctttaacttgattataaattatttgagataatttataattatctcaacatgagataagagatcatgtctttacatctttgtaactttcttggtgcctaacatagtatattggtcataaatatttgcttgactgattaattttaaaatacccaggaaggcaattgtaaagaaagatgaaggcaggtccattcaacatttgagcttcatgaagagagatattgggaaaaaaatatcttaaaccttgagggagatattgatgcttctctctcttattccatacttctcagctctgattaaaatttgtatacctttgtcaaaatgcatttcaaactaatgaagaaaaaatagtaatatagcatttgaatacagatcctatctctattattccttttatccagtgaagtagtttgacgatctggaacccttcagcaaaaattcaaataatgtccctttaacttttttagaatcggaataagccgatttcaaatttttctgccagaaagggccttttatatgatacgcttatcagtgagggaagaaaagggggagcttctaaaaaaaaaaaaagattatgcatttaaggcaagctaacacatttcctggcacatagtttctaaaaatattaatttattcctgttctcctttttgcttcttttcccttaataataaataagcttaattgtgaagagaatgagccactaaccttcagaaaaatgataattccttcaagagtagagggcttaactgaaatgcaaaatgcttataaatgatggattttatagtggtctagacacctaaaaagacatccaataaaattcctgaaataaaaagactgtttattagtgagtagcgggctatggtcatagtctttctactgtgacttctaggtgtccatgagtgtcctttcagggattctgagtttttgaactttgcaggaaaggctagggtctaagtgctaagctaccttaaggttgtatctttccagggagaaagtggatttttttcttttttgtgtgtttatttgcaatgcctttcagagttgaagagcaatctttcaaaaatgatgagaatatggaatcggccactgtaacctgattcggcaaaccagttccatttgggtgatttttaacctgcctctgagaaacagaaatgggcaggttggagtctccccagaccccagataattgagttgaactggtgttgtgtactagatggttgtacattagcttcagccctcttgccctctgcaaaaacatctctttttctcgattatttaaaataaataaatcaatgatatcataaaaaaggaagaagaaaacattagaaataaccgcccctctgcttctgcacggaaagcacagtctaaacctcagtgattttaaagacaattttagtgaagggagaaaacccatctgtatggctcagcaattaattttgaacatttgaagataaaaaggctgagttccttggaactggctttaaaagtcacaatccatggcaatctgaggtattcattgactaggggctcttctgtttattccaaatacccctttatcattggttttgaaagaatatggctctctgtaaagcactgccaattgggaaaagaatcagataatgaagaagtgattttactgtgatgacacccctttaggacctcagtaggatttcttctaaatcaaaaaactttgctttattagtgcattcgatggaggagggggaaaagaaaagcggggggctttccatttttcttttgcatcttcataacaaaacacatattgaataaaagcctctggatgagccacaatgtaaacccagagggtggaagagataattttgtaaattgtaaatcagaaattctatttgcagtagatgctgaacacatgtaatttaccagcgtaacattgttatcctgaatataagtgtgatggataccttgtaagtttgagaagaggggcagagtcatttaaatatcaagcatgcacaatgttcctgggttctgtggatatcaaatcttagcctacttgggagattctttaggagcaggacattgatccattggcactgcttcgagacagaacagtggacaaatgacctgggagcctcccttgggcttgcttcatgatcaaacaggtattaaactagcatggagtgagttggtggcacctggtgctaagatgatcatgctttacaaaatgcatctttagaagactaatatgccagacaccttaccaacttgggattgctaaccctttctaagtttgaattgacttcatgagattttctctccttcacattagcaagcaaaatatactgttcaggttggctgtgtgaactgggaagccaggtaattgaccctggtgggaggacatgagtggatggcagagcagaataagatcaatccaaagccccatggagtagctctccaagaagagtagttagctctagggtcctgatcctcaatttctctttctcatcctagtgtggtgagcagccactatataccttccccactggcaatgctgtttctaggccacagctgacacagacaagaggaccacttcagaggaaagataaataacaattattagaaatcataagggcttttttttttgtaattggagccacaaactctactaattgcctctgaaactatatgctatttactgtattttattaactgcactataggagagtatgcccattctgtttattggcatcttgtagatatattgagatttttgcataaatgtgttattcatcacagaccaagccacataaataaaatatatagaaagatatagtactgtaaccaaagtcttagagaaatagcttagcaagtgacaatgctgtcagtgaacatgaaagactgaaattaagcgttgcttttcttcaaaacatgatctttaaacaaactgaacttcagttcttcacagtctggggaccggtaaaagaagatattcaaagcaccacgtggggttcctgctagctgatagagaggcatccttggagagccaaagtaacttttaaaaaagaaaaagacagaacttgcaatacttaaatctgcaaaagagtaagatgattattcctcttctggaacccttttgacaaacccctacattttcaaagagttacatgggatttagcgaggcattgattttaatgtgagttgcattgctaaactacatgcagtcctttggaaatttagggtttgttgttcattacagagtcagacaatagtctgatttatattgacagagtttgaagaatgaaaaaatatagacactttggtgcaaaaatataaatatctaagttgcccactagtcaggcagggacaaccagaaagaaggaaaaaacaaaagttgaatctccagttcaaaatgcagttgaaaaatttaagtttcatttgaaaccaggggaacaagcatgaaaagttggacagggccatcataaggccccagtgattggtttttgagaacattctcctaaaacgttttcctgtttgggacggcaagataaattattgagacaatttctattcagaacttgtcctgtttacaacccatattacaaaaagttatattaccattgtcatcttttagcagcatgagtgatacaatctcatattcataatatggctattttatatttgcagctttatgaaaatctatagatatcaatatctgtttttttaatggatcttgctgaaatcctgctgcctgggaagttgtgcggtactgctatggaattatcacaaagcctcatctgacaattatgatatcatatcaggaatatattacttctaaagtatggaagaaaacttttacagtatcataaccaatcacattttagtttggaaataaaaactaaggtctatatgtgataattagttgagttacctcagttgccacaatccctctatcccacccaaggctgtctgtcagtgtcaatgaaattgaatgtcaaattgaaaaactctaaagctatttcttccatattagaaaatcactagcaaacatatcttcctgccctactgggagggtaagcaaaattagcacatatccctctccttgttttgtcaaactttaatcaaactgtttatgtagactgtgaggtgatcaaatactagaccttagcataagaagatctgatctctaatgctaacctttgataatctttgtgaaatatattcatcagacttctctgtgagcagttggcatggttaatctttgcatcttccctctttggcttccttcctcttttcattcttttcctatccccatgtccctccttctcaagctccgtccactccttaaataattggtgttcatcatagtggtacccctagcttattttgtttaaagtccttcaatatattctatctgggtgaaactctcctcccctccttcaagtccatgacttcaatttctacctacatgctcttgactcccagctaagttgtctggctgaatatttcaaaggcatctcaaagcctccttgccccaagttaaaattatcttctttccagcacccatcccccaaacaaacaacaaacgatcaaaccaacctttcccatgtgcccatacctgtcttggatgaatgacaccaacatctactccaatgctgcaagtacaatttttttttttttttgagacagtctcactgtgttgcccaggctgctaggctggagtgcagtggtatgatcttggctcactgcaacctctgcttcccaggtatcaagcaagtctcaattctcgtgcctcagcctcccaaatagatgggattacaggcacgtgtcaccatgcccggataatttttgcattttcagtagagatgggtttcaccatgctggccaggctggtctcaaactcctgccctcaaatgatccactggcctcagcctcccaaagtgctgggattacaggtgtgagctactgcacccagaccaatgggttctaattacctataaatattgaaactttttagcaggttaatcaagacattctctagtccctgtgtatcttttccagcttcctttcatgccactcatcctctgacaatctgccatccggccattctatttgtaatttctcaaatatacatgatgctgtcccaagcttttgggccttgtaaatgacttcccctctcgtcacacctcccccctgccccaataatatccctctctaacttgtggactcttacttaaattctaagacttggctcaagaatttctcctgtgtgaaaatgttctgagacacacacatattcatacttgcctccggagtaggtgcctcctttttgtgttcacatagagctgtgtgcacatattgtaaaaacatttattacatatgatagttgtggtgcactttgcctcccctaactatactctgagttccttggcagtagctacagtttttcatttgcctttgtattcccaaaatgtaacggtgactgctcagtggaagtacaccacaatgttttttcttttactgaatacgtatttggatcagccacatatatctggatatattcctagatatttgactggaaaaaacgatgacttgagtcccaatggaaaattcccttccatgggaattggggctgctccttgatctggttcatgtgtggtttttctgcaacctgcttcagtactttccttcaaattggtatttgacttttgatattcaagagtgtacagtcaactctctgacactagaagaataaacctttgggtaaactgtttacacatttagaaatatgtatttagctggcttcatatttcataaagattcatagactgattgatacccctaaagatgagcttcttaatcttaatcaaagtatataagagctactaaatgagaccaatagtctatctagtccaatattctaatatattgctaacttacttgaatgtatggaatgcttttctatcaaaagctgacatttatgatacttttaatgcaccttttgaaaacggcagctgaggcttagtgattgctttagtctgctcaggaggatataagaaaatactgtagactgggtggcttaaaaaacagaaatttatttttgtgctcttctgggggctggaaggcaccattgggttctgatgagggccctcttcctggcttgcacagggctgccttcttgctgtgtgatcacctggcctttccttggtgcatgctcacggcaagacagaactctggtatctcttgctcttcttataaggactttgatcccagtatggaggcccaccttcataatctcatctaaatctaattacctcccaaagatcccactcctaaacaccatcacatggggggagtttaagcttcaacatatgaattttggggagacacaaaacatttagtccgtaatagagattaaatcacttttctataggtacttaaataatccacctgcggggcaaatgctgactccaaatactgttttcttttccctaatcatttgtctttgttgctttttatacctaggtactcaaataattagtcctttacaaagcgagatgctgctagttctcattgattgtctctgatgtatcctcaaaacatgaatcatcttttaatgatcatttttcatatatgtttatccatgtttcttaactgttttagtgaaagcaaacaatataaggtctctctctctcttgctctcactcttgctctttaaagtttctcacaacaacaaaaggaaaaaaagaaaaggaaaacctgggctcttggtgcttctggcaattatattcaaacacaagaagcacccagattgtaattctgataagtatttcagttctttcttgaaaaattaaattcacaaaacaattgattatcagttataaatggcaaaaacaccatctggttttcaaaattggttaaatccatgtagcaaaggggaaaattttggaacttgtagttggcgaggagttctagtccatgaagcagaaaatgacgagctttactatgagaaagccagagtagtcataacttgtacttagcggctgcgggaatttgatgcgttcttcacatgttccatatgttaaattgcttggcgagatcttcagtgtgaaggagctgggggtaggaaaggcgtgtggctagtggatagactagaaacagcttaatcctaaattctctgctctgcttcttgcatgtagacccagtctaaatgtgccccaggactcagtttctttacctggggaattgtacgtgcaagttccttaaccttatggcacaggggacattttggtggaaatttctaaagctatttgcattcctctagtgaggtaaatcatacgacattagcatttcctacagaaatgtcccatgttgttctttgccaactggaaatttgagtaggtgttcatttgatgtgccaagagaatgaagggagatgaaaacaccctacatcttccaatgtccccatactgtgttccgagtgtgggaggactggggcctggctagattctcctggagattcagcttcatgaggaatgtttttccttaggagtatactgcaattctgttagttaaaaaaaaaaatgtttctgggttgctggcatattttcatcttatgttaaaaatgtagctatcctttgcttattattcatgcattgtaatgtgaaatttattcattcactttacggatatttagaaaggcacagtggttaattgcataggctctttctgcaagttagagactgtaatcttagggcagttacttaatctttctaatcatgtttaaaaaatataaaatgaaagataatagtatgtaccttggggattgtttcaagtattaaatgagattttgcatgtagaatacttaagaattcagtgaatgcaagagtagtaataatagtaacggcagataataatgttactatgtgccaggctctgtgtcaggattcttgccatataggacctgcctttatagtttacatatcactttcagcatacatatggccttacttttttttttttgagacggagtttcactcttgtcgcccaggctggagtgcaatgatgcgatctcagctcactgcaacctccgcctcctgggttcaagtgatcctcctgcctgagcctcctgagtagctgggattacaggtgtgtgtcatcacgcctggctaatttttgtatttttattagagacggagtttcgccgtgttggccaggttgatctcgaactcctgacctcaggtgatccatctgcctcaacctcccaaagtgctgggattacaggcatcagtcagcgtgcccggctggccttaacttttttattccaattttggtggaactttgctctctatttggtccgacccaggtacctcactgccagaggtagtaagaacgggtaggactttgcagactgggcattatcctggcacccacgtggcaatggtttcctgtctcctgtagtgctgttctcctgttggagctttccccacttctgaaggactgcctgcagttcatgcatcggggcctgtaattacagagcagaatatccagggctgtgaagaccgggcagtctcgaaattagtttatgcataatggataataggaggctgtttttaagtgtaactcatttggtgggttggcagatcatgacttcctttttgatatgtattatttatttattttatagcaagatgaggacagaaggctggggaagtcatttggcgcagctcttctagactatagctcagacttagcaatttacattcagtaatctcttggtcatttagccacagataatttgtcatggtttgttttagctgttgtgatattgatatttattatgcaaattgtatttcctacatcttattgttctgcattctatgaatacttaaattattataaacctttacacttaatatggctcgtccttcaatttgatgcttgagcaacagagggtcagagcgcacacgatcttctagaggggaagaaaataagtaattaaaaagcagacaaacaagagagccggctgcctggctgaaaagaaagcaaagagaatttcggggagggagagtgagtccggagatgcaagtcgctttagcaggagaggctctcccagagacaggggaagctcggagcacctgttggtccccagcttccttaggaagggctgggggcgcagaggaggagtgagagggtttgagccccgaaggaggaacacggcagaccctgccttcaccacactccctctccccaactcccaccacccccgctcttcacctgaagccttgactaattttttccgttgttgtgtaatcttaaatatctaatattacaaatatttcacacatatattcaacacacacctatatattaaaaccagggaggagaccctcgacaagcggaggagcctgagcataccctcctcgatctacctttcccgagattctgccgcaaaaagaccgactggaaaatctcagaacccgactctacggctgccttctccaactatccccgagtctaccgctaggctgttgagcgggctctcccgctccgccggacgtgcaaagcacgcatgcacttctcccagattgttttgtcaatccggggacctgccttcttactctccactcccgcacagcccccgttcccaaagatctattccttcggtgcaaggtgagtgacggaaatttgcaacgtctggttcgctaggccagatgcactcggtgtgcgggacagaggaccctcttaagggagattctccagtcgtcggtctgatacagcgattgctataaacattcctaataaaggtgtacaagaagctagacccgccccctggagcccgagtccttgcacgccaggcgcccgggagaacactttttccttgatccggggaaagcaaaacccgaattttaacataaacatatttgcatacgcccctccccttggccccgcccctaggtggcgcgggcgcgccgccgaacgccagcgccagggggcggggtgggggagggagcgaggccctccgagagccgggttgggctcgcggcgctgtgattggtctgcccggactccgcctccagcgcatgtcattagcatctcattagctgtccgctcgggctccggaggcagccaacgccgccagtctgaggcaggtgcccgacatggcgagtgtagtgctgccgagcggatcccagtgtgcggcggcagcggcggcggcggcgcctcccgggctccggctccggcttctgctgttgctcttctccgccgcggcactgatccccacaggtaggtgtgggcaccgaccggttggcccctaaatctccgaaggcaccccagtagccttggccacagaggggggaaacgtttccatgacaacctccccccacttcctacatccgaagcggagggagtgtggagaggaaactcagggctgagagggaaggggctgagggcatctgtgagccccttctcccctgcccggctaagtgtgaatgagagtccccagggatggctgcacccacaccttctctccccggcttggcgcggggtgcagagtggagtgagaatggggggcccgggggctgtaaagcatgggggaaggggatggttcaaagacaacctcaacccttccggacccttctaaactcgccgttctccccgtaacttgcaggtcctcccacctcccagggctgtccattcgcccccacctctccagagggcccccccagttctccatccccgaagcctcctggtggctgactcccagccgcccgcggcgtgatttctccccggtccccaggacatccccagacttgtctgatctcccctgccccttcccccaacgcgctctgcctttctcccctgtccccaaactgcacgcctctcgtgtttccctccggccgttcgcagccctccgccccctcggctctgctgcgggtctttttggcccggctccaggcggggaaagttccccggcccggccccgcggggggggcggccgctgtcgccgcctctgcgggaaggcgccgggagcccgcagcccgcccgccccacagcgtcctctgccacgagtggggacacgggatttcccggctgcccgttctttcggcggcccgagggtggcggagggggcgtcgcggcctctgcggccaggcgggcaccctgcgggcctccgcgcgctccctgcgtgaagagcagtcttgggaatttgcccaggggcggctctgcacgcccggtgccttccctgaagacaccgagcactcggctggagcccgatgtgtggctgcccgtgtgccgggcgcgttggcgcggtcgggaaagaagagggcagtgtttgcttttgctaacaaaagggagccggagctcttcctcagcggagaggccggctgtgctgcacccagcctcccttcccgccacctcgccgcgcttggcagccgcgcggcgtcctctggcccctgctgcaggctccaggcgggcgccgggaccgagtggcacggggccgcggggtgcgagcggcgatgcaggaggggatgcagcagggctctgagcctgcaaagcccctccttgcagctccagagctgcaggacccgggagcaacaagtggcggaggacgccgagagctcagcccccacctgcggagccccaggcccgggcgggcacagcgttggggccacggtgctgcttcaggggcgcctctccgcttgggctgtgccttttgtttacacgctagaggacacacagttatgtaaacaccgcaggagacacgctgtaggagacgggggatgtgtgggggtgctagcttgagatttgggggacgccgggttggctgcttgcccccaaaataggcttgcaaaggagctcggcttgggaaacctattggggggcgtctggcagcagcgtcaattccagcgctgagggtttttttcctccatgccactgtctccggatgttgtttatgtgtttttcctctgtgaattcttaatttatgagttacgagataattgggttcagccgatgccggtgtggttacaacttcatttcaggtgatgcctctgactggatgggttcaataaaatgttcctgaaagagatccctcgtgctgctgcattgtaaaaagcgccagtgtcagttaaacgtgagcgtgagtaaaggctcggtaactggcgcataatagaggcaacaatagacttgtattggctgcaaaaaaaaaaaaaaaaaaaaaaaaaaaagccggggggcggtggaaagctgtggtcggggatattgctttttgactaaaaatgggagtcgtgcaatgacgcttggcagcagaagtaggattagattatgcctcccctgtcaagactgctcattgaaggcaccgggtagtagcaacggtactatatttgtaactatctcgcggtgagaagttgccttccctgcgagggatatatgctgacttaggagcggtctggaactcaaccgtgcatgtcaaagctacatgaaaattctgttgccagttaccatggaagcagcttcttgctcttgtgtacatccctgtttgtatgctggttatcagattgtgttcaaattagaaagtaattgggtatgatttgtagtgaggagatgagatgactttcttaatttttttctcttaatgcatatatatatatttcgtggtgagtttgagaggaggtcttggctcattccggggtcccataccccaggggtaaatttcaggtgggcaccaagggacttttcctcctcagttctgtttaagctttctcagaggcctccagttcccactcccagggttaaagaaacctgttggtgcatctgacttcattaggcttgtttcgtttacatccttgctgggaaagcgaattaggaccatcgtgcgtgggtcctggttctgttttctcctgtaactgaagccatccatcccccgcagaaaatctcctctcatttctcctgtgatgtttggatgaaatggatgttaatgaaatgcagtaaaaatgggtttgcttaagctcactccacagtgttaatcacgcctgttatacgttcaaggtgcatgcatgatgttgtttacgatcccgagtgaaccagtagctgatcacccccctcttatcattttcaggattagagaagatggctggtggatgggggatttatggtggtgatgggaaggaggggggctgacttttgcttgctttggcctgttggggcttgcaaaccggggatagagactttacaaaagtgccgccctgttattgttgcctttccctgcatcagattgaatagccgcagtagggacttgcacttgtctgtgatagatttgataaaatatccctcattaatgccactttatatttacagtgtgtcactggagacgcacaaggcttcatttagtgacttgtgtgacgagacaagcttgcattatttgcctgggacgttttggaggaacaagagacccattgagcaatcttttgaaatgaacaaatacgaaaaagggggggaataaaagagcaggcagttctctggaacaaagagctttattcatatggatgttgtacatgctttatccagttttccccaatggccctcctggtaaaggggagtgggacagggaagacgccaacaggcaggacactttcgtttcctctctcacttcctgacttcatattcttatcggagttggtccccggctcactgcctgctcatctctctccacactctctaaaatcccagaaggtaacggattcctgggtctccacagagagattgtgaaatcctttcttccagctctaaatttcaacagaagacaatgctagctacctgttgaggttgatgttgttggaggatatattggttgaagggaaagagatgtcacttttctatgacatgtgtcaagaagtggttgatagtgaatgtcagattggtaagatgtcttgcaattataacattagccttattatttatttggaaagaaatgctgtgaaaaccagcatccaaaaattgtattcttattgatggtgctcttggagtttttagtgactttttcccacacctggtacattttagtctcatacataagtgaatttttattattccttggcctatattgctaaatgatttttaggctttaaaaattgataagattgctatgaatataaactgtctcattctcttgggatttctgtacgtgacattttaatgcctaattggtcacttagaatttacattttagaaatgattttgtgtgtgtgtgtgtgtctgtttttagcaaaaggtgcattttaatgtggggattctcttaaattgggccaaactaatcaatgctataatttgaatggaaatttaccagcagatgaagaaaattcaaaataaatccaaaggattcaaatgctgtacgtttttcttgggaagaatagttttgaccattatgctgggcatttttaactgaaaatccagcacagaaaggagaaatcacacagcgacatctgttgcagaattgaaaatttgctgctttgagttggaagcaattagtcccatataagcacctaatggtatcagtgtgtgtgtgtttgtgtgtatgtataagtagtgatacaaatacatacatatacatacttatatatacatatatatgcacaggatacaaaaacttgcccacatacaatattcatattcacattaaaaattatgtaatagaaaatgtaacattttgggactaaagctgtttttaaaaatattaccttttgaggaattagagattcttataatcatggaatttttgagaggggaaagatattagaaatcatctggtgaaatcccattttgaagtaaagtagccgaaggccagggagggaagaatcttactctgcagttgaactaaggctaggttaacgacagatcctggatagggacaggtcccttgatgtccagccagtggaccttctgttccgcctcctggcaaggatgcctggtcagagatatggatcatgaatagacactatcttggctaaaaatattttgtattttgaaggcagcaagattaattgttgctctaggtaataaacccatggatcagaggagtgacctctgggaagaaaggaccagttcttggtaatattgtctttggtgttgacaaatgatcctgaaacctctggaatttatttggcagccgcaacagaaatgtcatccaaagcaccttcataggggagaaatctggatttgtgtcattggaataagtctgatatgcaaaaaccaggcttctgaaggctcagatttagatttctacagttttttatttgtcttttcaaggattaatattagcagtagaactggttctgtataactaaggaaaaaaggaaatgttcttaagaacaagaacagagcttgattttcttaccaggaacttgcctcttttcatgaaaccaagaaaaagctgagaattttttttgttgttttttaaagaaaaaaaagttttattttcgaaggatgacttttttttttacattgatcagatttttcttttttcccattttattatggaaaatttcaaatatgtatacaaagtgggaagaataccatatttaaccatgcatgcaaatcacccagtttcaataattatccacccctggtcgctctatcccctctgtgcttcttcctttcctcagattactttaaataaatcctgaacatcctatcatttcttccataattacttttagaatgatttctaagatacagcccctctttttccactccttatcacagtattattatctggccgtacgcacagtattctcacctggatgtaccgaatttttgccttagctttactgaggaagagagaatgaaggcttgttgcagttggtgaaagcaaaggcagaggccagagaagctacagcacgattattgcttctactgaggagaccttctcctatggtttggtttattttgagcaaggttttgtttggatcggataagatgagttttattgttgtgcaaatacagttgtgtaaatatgcagtaattgtagctagtccctcaactgtggcgtgcgctggaaagcaccgttggcgagactggccatttccaattgttcccataatgattaccgtccatgtgaggacttctgtaggaaaggctcatgttagtttgatgactatgagataccccattcgtatatttgtctttaaaggcctccatggtataaatacctttgcattttgtgaatatattgcttaaaataaaaatgtctctttccatttcgaactggctaagtgctaatttcagccgctattctgtaactgaagtgatcacaaaatgccttctttggtgtgggaaactcatgcatcaggctgtaagtatttgggccttatttttgtgggatggtggtgaaggatggtggggagagaaaaggttactacctttacttcttaatatttgctccattgatttaaaatgtgaatttttaacttcagctagaaatgttggaatgcttcagtgttaatttcaaaaagtctttggtttttctgaaaattgttccgttttccaaggttcatgaaatgtgagggtttttttttttttttttgaggctctttctcaaaaatttcattaaatatggactataaatctgaagcatttaacatttggtttttttgtttccagacaaacagggaattatgcatgagatgattttgaggggtccgaatggccctggacaggtgaaaacctgccccctgcaccgccccctctgagttgaccagggcacaagaaaagcacaaaggaatgcctacattcacgatttggggagcaccagcaaaatcgaataaaaagccttagtttggaaaccatcaatgaaggaaggaacccactggaatgtttgtaattacaagtggcacctccttgtttaaatttcagaagccacagtttctttttcagagatttaaattgcaggctctagccagcagctgctgttgtggttaatgggcagtttctctttgaagatcttccaagtgctggttctcaaaagctttggtgcagttggccttgaactagggttagaaaaaagggcgatgtagatatttatacaaatgcacagctcaaatgacgtgtggcctttattattactcaaaagaaacttggtgttaaggttgagaaaaacccagcactgagaaaaacctgttatgactgacaggtgtcttgaatgaggtgattatcttaagggagataaggtgggagaaattttttcttttagtagatgttttactggaatacaggcatttgacctaacattttgatctaggtatttcagaaatgttaaataggcttgaaatgaaagtgctgtgatatatatttaaatgctactcagtgtttgaagttgatattccagtgacatagacttttaaaaatgcctagaataagtatcttgctcttggcagacttccttgggaaggtaggtgctctgattcctcgttggctgtccagcactggactgcagtgtctagttggaattgagttatgccgtccctagaggaggtgggaagaatctgcctgaaaacaaagggttctccagttccctgactcccattgtctgtgccatatctccacttggctgggattaacctaaaagttaacgtttaaaaaatttgaacctttaatctttttgcagtaggtatcaacttttctcaaagtctccattattaccaatgacaccattgacatcctggtctccaaggcccctaaatttggagtcttttttcccctccttagctttcctgcttgcactgaaataaaatggggctgattgtttctaagtgacattctctggaaacatcagtgccctctccaaactgtgttttgctaacaggaggctcctagccagttccccctactctagtcctctgctagctactgcaattctaattcttttcaggacaggatcataacatttcccattcagaaacctaatctcaaattcttacttcttgcatcagattcaaactccacactgttttgtctttaggttgttcttcctcaattgctctcccactccctctctattgccctcatttcttattacttttcagcttaatcctgatgggactggaagactgatgattctccagtgaaactgaggaagaaagtggttctgcctatcagccttcagctggttacctttgcataaaatactctctttatcttttttcccttaactaactgtcttggtttgtaggtgtaggatggctgatttctctttgcctacattgagaataaacaccttccttttacatctttcattttaactaacacatacttacctaaaaggtacctcaacccacaagtttctttcttgacttcacaggtttatacatgattatgtttcttgatgctaagccaaactgtgttgatattatggccatgattttcgtgaaaatttaaaacaatacattcatgaaaatgtattgtctccatttggtagtttgtatttgaatatggggatttcctacagcatgaaaattgtgtaattgactaaacaaattacaagctgtcaaagtaagactttcagacaaaaagtgaagtcctttagaagtaggaagactttttaagggtcacagtcagagggcctcatgtggaactgctgacttggggtgaatgagattggctcctctgaagatgatccaagagataccaccaccttagaggagtatttggtgcttgtgtctggtgcgtgtagttacctagttaccagaaaataataaataaaataaaataaatcctaaaaaatctacccagagagatggaagggaagtgctttaaaacccaggcctttattagctagtgttttcaacacgtttgactttgggagcagagctgcctggctaaatgaagttaccgccatcagtcactgccaggccagcatcgggacaggtctaggaatttagttacattttgcattttggtagataacatagagggtggattatcactggctcaagaaacaaaaaaatgaaacctttctttctcagtctacctgctaaatttgttatcgtaaggatcttttcaaagcctttatctgggagcaatatctgccagagttcttccttccttttttgcttgcctgacacccttcccttcagagttcagttcttgctagtagaaaaaggctatgcagcatgataatacagtgattttaaaagttgattatcttgaagtattttgggacagttttggggaatgggttatgtggtatatatttatttggctctttgctgaatatggctgtataaatccagcctcctggatgttacaagtcatccccttgatttcttcttttgaataaaaaaggagcattgcttcatttttcttgcagaaacccttatttaaacaatgaaaacttcaaagatagggagaaaaaaaccaagttaatttagtactaaattactgctcaaatggttttatcttttaaaaggttcaagtagagattagcttaaatacactgaatttcacttttccttgtacgtacatatcttgtgagcaaacttcattgtgaagagctctctgtcttctttagttttgttagtaatcacataattgttagttgctgtttatttccctttcctgaagcaaatctctccatctctgggccaggttggcaagtggaatacccagttaagattacaggatagtaaaacccagtgctttaatcaaactgcttactttacaagatggcaaaaataaaataatatatatgaacactcttaagtaggaagtgttttctgcctatttacctatctctatttatcaatcacttttattaaaacagcaatacctagtggtgggggttatttctctggctactgctaataataataacttttgtaagtcttccacattagggaatactgaaaaagaaaatactatgtaaaaaggattaattcaggatgtactcagtcatctctaaggtgaaactgaagaacaccgtgacagcaagatcctaactggagttgaatgttttttgataagtaaatggaatcattttgtaatcttggggaaactgacaatgattataatctctaatttctgggtcttctaatacagaaaggacatattgtttcatgcagttttttatattttatatactatgtttaataaagaaatggtgtttctgtagctaacccataagacatttggtagaaaaatgagcatttaaaaatgactttaaaattgagtatctgcttttataccagacactgtgttaggttcatctttgtctttcagaaggttctagtctatttttccctcaacttttatttcaaaaaatttcaaaaccacaggcaacttgaaagaagaatacaatgaatacttgtatttactttacctagatccatcaactgttaacattttccccatttgctttctctctctctctcaataatgtatacacacatactcatcttttttcttccctaagccacatgaaagcacattgcatcatgatgaatacttcagcatgtagcgcctaagaataaagacattttcctgggcacacgcaataccattattacattgaaattatatagtctatgttcatatttccccagttactttgttctctctgctgcagaatctatcagagatcacacattggatatggtctctagtctcttttaatctagaaccattaccctgcttgccacctgttttttctttaaggagtttttaaggggtatcttttatggcattgacattttgatgaatccacctgctcttttgtagaatgttctgtagttctacaaattgtttgatcatttcctcatggttcagttcagattaaacatcttttgcaagaaccctgcatagctgatactgccaacttccttgtaacactgcctcaagagggacataatatcagtttgccctattactagcttgatccttggttcaagatataaatttagttactgagtgtaggtgaatttgtagggttctccatttttgtccctttataattaataagtaaccttgtgtatacatatcttgtgagcaaacttcgttgtgaagagccctctgtcttctttagttttgagcctgaagatcttgttctctaatggccctttacttaatggattgagcagcattggtaaaccttgtctgaatcaaatattatgtccgtggttataaaactgtgattttctaattctgtaattcctctacttgggtagaggcatttctgaataaagaagagcttgccttccctactcttccccctcttttttttttttttttagaaaattacaatgggttcagtatggtatgtttcattaccatcggatttggccagtgggaaccccttcagagtggctcctgtatccttttaatatattctcattaatttttaagctcttttgtatttcatgtcacaagaagatatctatgtttacattgtattttcctgcccccatacctggaatcagttatttctccaaggaatcctgattccttttagtcaaagaatgatatttagacagcggacacatctaagaattgtgctcattgctactgacttgtcattgtttctaaacttttccgtgagcaaacaagggtgtgtgtgtgtgtgtgtgtgtgtgtgtgtataaaatatcctttgtctcaaaaaaaagttatatgtgaattttcagctgcatgggggtaggggccctgtgttcaagggtcaactgtgtgagtgtattttaaaaatgtttattcatttaaatcacaatgtcatgctaatacattcaattccagtctaacatctgagggtactttctctccatctcccattccttatttgtgttttctttctcccatggtgaaaactctgtttcccagtgatagcaacgtctttttagtacaaaatagttttggaattactccaccaagaccattgtagacaacaaatctaccaagtagagcgcaggattttttgccactctttttgtctttaaaatagatcccactgagggtagatgagtatcatgttcacaaatttacagattagtttttttgtgtgtgtgttatgtatcaataggtatacagttaggatcatttatttctgtttatattttgttttaatttctttcctatcattgttgatttataatttgaacatataactcattaacgtggctcaaaatcaaaactgtccattctcatttcgttccctatgttttttgtaccattcccacccaacttcctatagttgccaatttcatacatttcttgtatatcctttcaatttttccttttgaaaatataatgagtagtgttctattctcttaaactttcacacagcctttgttaatatctgcctataatatgtattatttgacaaatcctaggttctcgtatttgttatgatgaccttcctcctcatttggctgtattttactttagaagccttttgtttttatttatttaattatttatttttattttactttaagttctagggtacatgtgcacaacgtgcaggtttgttacataggtatacatgtgccatattggtttgctgcatccattaactcgtcatttacattaggtatttctcctaatgctatccctccccctgcccctcaccccattacaggtgtatgatgttccctgccctgtgtccaagtgttctcattgttcaattcccacctatgagtgagaacatgcagtgtttggttttctgtctttgtgataggttgctccaaatgatggtttccagcttcatccatgtccctgcaaaggacatgatctcatccttttttatggatgcatggtatcgcatggtatatatgtgccacattttcttaatccagtctaccattgatagacatttgggttggttccaagttttattccaagtttgggttggttccaagttactattttcacttttctcccatttcttccttccaagttcatagttttacttggatagtggaaggaattcattttttattttcttttttttttgagatggagtcttgctctgttgcccaggctggagtacagtggtgcaatcttggctcactgcaggctccccgccgccaggttcatgccattctcctgcctcagcctcccgagtaggtgggactgcaggcacccaccaccttgccaggctaattttttgtatttttagtagagatggggtttcaccgtgttagccaggatggtctcgatctcctgacctgatgatctgcccacctcggcctctcaaagtgctgggattacaggcatgagccactgcgcccggccttttttttcttttaattcatcaagttacttgcaagaaaataaggattgcccttttcatacaatataacgtgtctctgatatttaataaccatgccttaccttgcttctgatcggctgtctttttttaacccttctccttatccaataagttggcaaataaatgcctcaaaccccaattcttccaacttttttttttaattgcagtataatttacttttaagtgcacaaccaagatgtcttttgcatttaaacctcagactatgttctaaaagtgcctcttggacatctcagtccggatgttccagttatctcaaataatatgaatgacaaaacagcagttatatttagtgtctgtattcatgatctcatttaatcctcactgtcaccctatagttaccactgttgccccattttacagaagaggaagaggagaggacagtaataggtcccttgtccaagaaacacaaatggtaagtatcagaaccaggatctgaactatatctatgttcaaaacccacagttttaaacacttaactgcattttcctaaaattcaagacgtctaaaactgaacttcacatctgttctggccgggcatggtggctctcgcctgtaatcccagcactttgggaggcccaggtgggcggatcacaaggtcaggagttcgagatcggcctggccaatatggtgaaaccctgtctctactgaaaaatacaaaaattagccgggcgtggtggtaggcgcctgtagtcccagctactcgggtggctgaggcaggcgaattgcttgaacttgggaggcggagcttgcagtgagctgagatcgcacccctgcattccagcctgggcgacagagcaagactctgtctcaaaaaaaaaaaaaaaaaaaaaaaatctgttcttcccacatctccctctattccatgtttcctattctgatgaagggtaccaccatccatccaatgagttaaataaacctgggagtcctcatagagaattccctcctttgttatcatctccccctatattagctataggtcctgcctgtcttcattttacagacgaggaaagtagacttacaatggtataacagccccttaattgtttcatttactgctagcctcattccttgtaatgcatccttaacactgattctagaggaatcttcctaaaatacaccttagatgtcactttcttgctcaaaactttaaatgtttttcttggcaccctaaaggtgaggcttaccctctttcagtgtgtcctgcagtgtccttcatgcttggcctcgccggctctccacaccattgtttttgctttaggactaccagagtaaatgtgtcctggatgcaccatgctctcccatgcctctctgctttttatatgctacctcctctaccttaagcaccttaatgtatatggctagttcctacatctctctcaagattcacctcaagcactgcattctgaaaggaaacttccatgattactcaggctggttaggtatcttttctttgaacccttcttctgtacttccctaagggctactcctaacttatcttcctccttcctatcaaacagacttctctgaatggcctgagtctcttctatatgcccgctacacatttcgtccaacttgtttccaccaatagacatgtcctatcctcataccttccacgtaggcatatttaaatcccatgtatatgtaaagaccgaagtccagtgtttttaagtcttacataatttctcagcttgaatatgttttcctttcaacttctgtcacaacttctctaaccatttcatgacatttaacattttttacacaatttgatttctaatatgtatatatcctatccttttcatttcttataaatactggttgttgggatacagaatatgccaaggccttagtgtctatgaatttaatttagtggtggtcttattatcagcttttttagggctataattcttagttgaagttgtttgttctcccataatgaatgaagagctatcaacgtgcctgacttttgtatcttgaaggaatgacttctagtgtgtttgttcatacttggttgttgggcaatcattaaagagatttagtctagcagtccagataagagaatctctttccatttatttaatcacttcacagtcctgggatacctagactttgagtcattgctgaggctatatcgtcactttagagttgaagcaacaaaccaagaaacttatctctgaggtcatctgttcctcttcacctcagctttcatgagaggcttgtcttaaaactgagatatatatattcttagaagaggcatggtgaacatacggaaatttaaacctcagggtaacagttttccttgtacagtaataaagatgtatctggagtcagtggctacaggatcaaaaaatagatcacagtaatcggatcaaacctgagaaatggctttttgctgtgtttaaaaaaatgacatgggtaaggcagtctgttttgtggcgatgcttccactatttgtgtgactatacagtctgtgaaataggactggcaaagttaagcttataaagttaattgcctacaactgatctagctttaaacagaaagtaggtttccttttggtcttgtgtagaagaggggagagatttcatgtgtaggcagagagagtatgtgtttgctaacattaccttttaatttaggagaagtttggagtttgttctttcctgtgaatatagaggtggaaccactctaaccagagtttattgctgtaatattttttaaatgcgtttgtaacactgatgtatctgtgaccttgtgaaggagtttttgagaggagggggtggcaagccctttttctcactgtcataagtgatgcctactcaataactctaacttcctgacattattgggagggggaggagggcctctcataacttgtttttgtatgacttagttctaaagtgttcccttcatagtcacatccatccatttagacttcccttttccctgcctaaggcttgcatccagcctagtctgtgtttggtactttaaatgctttgaattatggagaatcttagtattttattgatgcttgccttgtagctacatagctctatattgtcttaggttacacagcttgcatttcttaggcattgtgagtggattattgcaattagttgaagttttgagaggaatgctatgtcttccttgatttctaccaagtgccatattctttttcttggtagatttttttttttttccagggattgccttttaaaggaccttttaagttagaggcattaacctttctttccatcataactctcagcagatatatctttttcagcatgacctactgtcaagtaaataatgatttgatggcaatgttcaagaaaaattgtatctttgaaatacaaatttttgtcagtgtcttaatgtatagtatatgattggtattatccaagaagaagaaaagatgaatcaatttcttctagaattaggtggctaatgcttcaagcatcctatttaaaaacaattacatgtaggcctgtcggcaggattgcttatttcattattctggtcatttgcatgaaaacaagttgatgattctttaaccactgttcagttttcttttccttttgaattattattcctcaagcattatattccattcatgcaacagcatgaatcagatctagaaagttagaatttcagactaagatagtagcagattttttttcaccttttttaaccgaaaatgatctcccattttcatattaatttacctgtgattacatctctttatccttgtttcataaggtgagtgcatagagttatgttttaatagaatatttttcaaggttttaggatttttttaaatgaggtcatcaccttcaagattttgacctgaacttttcatgaactaaaggagcaagaaaaagataaattttttaaaaagatgaatatataatgtacttataatggaataactgatcgaagttaaattcatttgataacgtttatctggtgctagttcccaaagcactctaccatttcaacaagagaaactccatgttcatacattggatctcccccataagattctctttgaaaaaagtgttttacttttttaaaaaatggtttaaaaaccactggacttaatgaatctttcaatttccaaacaacaaggctggagcaaatgaagcctggttactgggagagcacatcagggctaagaccaaagccgtaggcagtaacaaagaatacttatttgcctgacctttcctctcttcgtattctccttggggttctggaaggtgggactgtggccacagcagagaactggttcaggagctgagatttcagatcacgggcacctctatctttccattagagggatataaaggagggagctagcctggagtggggatgcctagaaggctttccatttaaacaaagtctcgaaaatatgggaaggattgctattgagaaagaggtgagaaggaaaggcattccatgttgaggagaaccatgtgaataaaggcttacaggtaggaaaactaaaatggctagtgagagatgggattagcaacagatagtttggggccagactgtggaaaaactttgaatgtcaggtttaaatgaaattcaaggccaggtactatggctcatgcctataatcccagcattttgggaggcctaggtgggaggattgcttgagcccaggagcttgagaccagcctgggcaacatagtgagaccccgtctctacaagaaataaaaaaattgcccggtggtgtacaactgtagtcctagctacttgggaggctgaggtgggaggattgcttgaacctgggagatgggggctataatgagctgtgattgcaccactgcactccagcctgggcaacagagtgagacctgtctcaaaaaataaatacataaacaaataaataaattcaagaggtcattggggagtcttaaattttttgaacagtgaagtaacatcaggttggttttttaggaatatgaatcctgcaatgataagaaattgagaggttcatgagtcctacaatgattagaaattgagaggatcttccattagaaatggagagattggttaggagtataatagttcaagcaagacaacaaaaacttgaattagggcagtgaaggaagaataggaggtagaatggagcctccattgatggctgactagagaatggggattgagggaaaacaaataatagaaatgaaggtgtgctttgattttggacttgaatgactaggagaatgactactctaatgaacaaaaatgtaaatgttatgtgtgggtttagtaagggaatgcaatgaacttggttttggatatgttaaacttgagttatcactggaacattcaggtagaaatgtttagaaagcagtttgaaataagagtttagtagaaaggttgagagcagcgctgcagatacagatttgaaagtcatctgcaaagagatgtgtcttagcgttctcacactgctggtaaagacatacccgaaactgggtagtttatataaagaaaaagaggtttaatggactcacagttccatgtgactggggaggcctcacaatcatggcagaagacaaaaggcacatcttacattgcagcagagaagagacagaatgagagccaagttaaaggggtttccccttataaaccaccagattttgtgagacttattcactgacaagcaaacagtatgggggaaaccgcccccatgattcagttgtctcccactgggtccctcccacaacacgtgggaattacaggagctacaattcaagatgagatttgggtggggacacagccaaaccatatcaagatggtagcaaaagttttacattatgcttttatttagttacttctttaatacacatttattcaaaggcccagtgtgtgccaatcattgtattaggtgctgaagacaggcagaagtgtatgagagatccttaaggggtgctgcagagaggttgaatcttaaggaaggtgtgttggtaacaagataaacagcctgtgatgaatgccagaaaggactagtcagaggactggaagttaaagttgtggaagaaggagggagtcagtaccaggtggaagatgggcaggattggtgtggggtgaaagcctgttaaccaaggtgcagaagaatcatcgaaggtgagtgtattgtcttgaaagtgaatgaactctggggaagaggttatttaagcaaatggattcgacttagagatttagccagtcacaaagctaggatatggcaacaccggaacaagattccaggttgttttttcttttctttttttttttttttgagacagagtctcgctctgttgcccaggctggagtgcagtggcataatctcggcttactgcaagctctgcctcccggttccacgccattctcctgcctcagcctcctgagtagctgggactacaggcgcccgccaccacgcccggctaattttttgtatttttagtagagatggggtttcaccgtgttagccaggatggtctcaatctcctgaccttgtgatccgcccgcctcggcctcccaaagtgctgggattacaggcatgagccaccgcgcccggcccaggtttttatattggagtccatttctcactgtagcataccagtacgccaaattgtgtctttaccatggtatagggaactagaaagagccagttcagcctgtccatattatttaaaatgtttaattaagatacttgaagttgttggatacagagaaacttaataaacctcacgactatccttgtatttcacatgaccaatggcagctttggcaggcttaagcatggagggaggatagatggaagctgtttttctggacatgtgcagcttttaacaagtaccaccagagagcaaaaacaaatcctagtgtagcacagggagcactttccggatggcaggaagaatctaggtcagcttaatggcaactcctattctttaggtagattaatgtttgccccctggttttcagcatgctgtacgacatccagaaagactgtgcatggttccttagcccatattagttagtagggggtcatgaatgaaattgatgtgtgggagccttttgatttacagttgagagagtgtagctcaggcctaatgtggaaacatgctgagttgtagtctgcattttcttaactcctttatgtaaaggacacatccttgtggacattttgcatgttacctttaggagatgactggtctcctatgggtaggatgaccaaaaagtgctcagttgatcagtagagctctggaacctgggctggctagtttggcatcctttttctggctatgcctccagtgctgtctaatagaacttttgtgatgatggaaatagtccatatctgtgctgttcagtatagtaaccactagtcacgtgtgactatttagtacttgaaatgtggctagtgtgactaaggggctgaatttttaatcttaattaatttataggtcagtagccatgtgtgtttatcggctaccatatagggctgcatagctctagactaaaaaacatttaaaaagccaaattctcatgctcatcggtatttttaactagtgagaggaggttggaagagggttgagttatattgatattcactccaaatttagtaggtttatattgaacattggactgagctattgtgggcttgtgaatttttcttgactctcctcttgcttttcatgtctaaaagcctttggaatatcttaatagtcctttcctcatttgaagaattaccccttttggccttagatgggtgtagctcatctagtgcatagattaatagctctagctttgtccttaggaaggtaaatcttgaaggttactgttacatgactctactgccgtatgccaattcacattgttatttttgtgtgtgtgtgatgctgaaagtgagtgaaatgtgaaaaaaacattattcattttaaatagttttgactgccaggttaatgcaactcttaagcagagcttcatgaggtctggccatagtaactgcttttaacttgatttaaagttcttaaacgttctgaattgcttcacctaatctttttatactgaacgtataattttcagactcgtctttattttcaaatccataactgacagctgctcaacacctcattcaaatagttttaagagttttagagaaaagttgggacagactggatttactgacatcagttggattgagatattgtggatttaaagatgatagagaaggagagggaaaagtatgaaataattattccgtgttcactgcttgcccaatgacagtgatttaaagcctaataactaacaaaactgagagatggcagaaggacatttgaattaacttccaaatcttaatataaggaatgagtattttctttgaaaacaaaattttcatgtgtagtcctattcgttttattatatttttaaaaatattaatgcacagaaatgcatatatgccaaaacctcactacaacctttttcttggcgtatatcttccagattctgtgagattgtcagctccttaaaggagctaactctttaggggactccatgatgtctagtgcacagcaaacattttccaaacagaattaaccatcttataagagaaacacgtttataaatacctctacttccaatgacaaatgaaatcatcttgtgattcaactcaagaaggctctgggctacagtgaatatagagaagcttcaggaagtactgtttaagagttaaaattaatgtgactaaattttgtcctcatccttttgagaaaatgcatgcatgtctgtgtgtgtatgtgtttgtgtgtgtgtatcacttactatgtgctagacactgataagcactaggtttacaaagatgaattatataggctctcttccatcaaggaacttatattttagatgtttttgcaggacacagtaaaaataacaataccatgtgccaagaaccataatagatatagttcaggagtgctgtggaagcatagaagaggaatgtctaactcactatggagacttagagtcaggaaagacttctagggggtctcttgagttgagccttgaaaggtaggtaggagatagccagatagagacggtattagaggagtttttccaggtagagagataatgggcggaaagacaaaagcatgggggattctgggaactgcagatagtttgctatggctgaggggaatagcctttgaaggagcaccaaaatatgaagctggagagggtacacaattgtcaaatcatacaggaccaacttggtaataaagagaagtctgggttttattccatggagagtgtcaatgaggggagcgggagggtgcaggacgaatctggaggattagagactcaggtaggagagcagttagggagcagctgtggaaggccagctgaaattttgagggccagaacccaggtagttgctaggcagcttgggaggaagttggtttcaggatatgtttaggaaagtagaatttcataactgatcaagagagtgggaagaggaggagtctaggttaatggtcaggttctggcttggctgcctaagtaggtgatgggtgtagtaactaagacaggaaatttagaaagcagacagtgttgggattaaagaggatgtgcttgaccctgcagaagttgagctggaggcacattcaggtgaagatacctagcagcactctgtggcactcatttggagacatggccatggatgagatctcctaagaagaatgtatatggaagaggaagagaagctaaggacagaatgtcaggaacgtcaacaattaaaggtaggcagaagaagatgaactagtgagaggagtgaagaaggggctgtcaagagactttgaggaaagccaggaaagccttttgttttggcatctaagaaggtgagtgagccacagtgtcaaatgctacagggaattcagataagataagggaggccaccatggctatagaacttaggtattcataggggacctctaccttacaattttagtgcagcagtgagtgtgggaaccagatggcaatgcgtggagcaaatggaagtgcagaataggaagcatgctgtagacacatgtttgaagaggcttgactggtaaaggtagggtgagggagaaggggactggaaataaggaggtgtagaacttagagaaattttaaagtatgtatttttttgaattagggaggtgtgagaaggtttatatatatcataaaataagagatattacagagggagatgaaaaataggaaagtgagagttgatcactgaccatcaagggccatgatgaggctcaggaggaggcatttgctgagaggggtgggggcaagagaccattgttttcttctgaggtggagataatgggcaaggctttaagaaggagggtggatgtagataagattgcaccctgcagggctgaggcctggagggagggagaaccttcttgggaaagtaggatcccatgctaaacctgttgatggtgagatggagctgtgcagggtgagaaactgggaaggtttgaaatgttctccctccaggagaactcagaaattctaggaagcaaccagctgaggctggaaacattacgttgcagtgacccaaggccccttgtgtgctgattatccttgtctgagcagcagactgaaatgtcactcttcccagagaccagtctgagatgtccttgatatcttccttccctttcagagggaaggcaggtcaatgtatcatggaaatttagagctgaaggggactttagagagcacacagaactccctcatcttgtaaatgaggagaccagctcagaaaagtgaatgacttattcaagtggatccaaggccagggctaagaccaggcctgacttgcagctcagggttttctttgttgttcccttgctacctccttgataaggattattagtaaatcccactcattataaatgctcttaatttcccattttgtacactgggaattctacaccattttctttctcttccagttttttgttttgttttgtttttcttctttgtggagttcaagcaggtataacagtattctaggatgctaaaaataaatagacttaggtatcttttcttaagtggagatgatactggattagatgagaatattatttgggacctgtaaaaaggtaaaacttaaatgctgaaatgtttggaatttctgttcttacaaactttataattttaaagataagtagatttattcacacattttaaaattctttcattccatatttcaagaggatttactaggtgatgatgccacagcaaagaatttccatatctctcctgttgtctgttgagaattgatgattatattaatagtctctccatctagagtgttaaggttaatattgttaacttgtgaatgcttctttgggatctaccatccatgtccttagcctagacaagaactaagaagcagaaaatagaatgtcttttggataaacacagatttggtaggagtgatttagtttggagcaggggaaccttaattaattatcactgtttataatacatttttcccctttgtttccaagaatgagaatagttcagcaacacaattgataaataaaacataaaaggacagttatggttgccctggtaactatatttctcagcaagtattttgtttgccatgaaatgtgtccagggttatttattggaaatcagactccaaatgtcatgactttttgtatttgaatttcttatgtactcatttaggagggacaattttgtacgtttttttgggttgggttctgaagctctatgtgtgatggggatccttgtgtgtttttctttttttggaagacaaataggaaactgtgattacagtgaatctatttaagatgaatttccaagtctaaagtgggatttaaaagtatttgaatcattttggggatacatgaaatttcttaaaactggaatattttaatgtagaatttgaacataagatactttctgatcaatgatcaggaatatgttaacattacattttgacttaattcctatgcaattaattttgagtagaataaattattctcaaaaaagtcttaaagataaaaatcaaaataattaagcaattagagcaattgccacttctagatgatttatggtagtgtgaattaaagctaagtgaataattttttatacgtttattgtattcttttacccccaaacaaaatcacttcagtctacagacatagttttacaagtgcacaaatatatacgtagaaagatgtaactgctgcatagattttaatagcaaaaaattggaagcaatccaaatgtccatcagtaagggactggttaaataaattatgatctgtccatacaatggaatacttggtagccattaaaaagagtgatgtagatctatatctactgacaagagaagacttccagggtgtatcagtaggtgaagaaaagcatactgtagaacactgtgtaagtattttatatataattaatctataatgcatactatctaattggcatattcatttaaaatgtgaagaatcaacagaaagctcttaacaatggctatctctagagagtgagattatgaaggacttttactttctgagttaactttgcatattgtttaaaatttctgtagtgaatttgggttaccttggtaattagagaaagagagaagatacaaagctgtatttaaagggtctaaaaagatcagttgaaatgggtgtggtatgtaaatacattaggctttgcagtaatcgtttatttactctttgtttttgtctagatacataggagtttaaagaggtatttatatttatgtcttttgaaacatcatacagatttttaagccttttctagatatttacccctttttttcttcacattttcagttattttctgaatatatcctttactttagattatcactttgcaaggtaacctgttttatttacattttagttgctattgagtatgctttgatggactttgtcttttgtttaaagcattattgctggcctgattactagatttgttttattttaaaattatatgatctccatatacaataccagaagatttaggaattttatgtataatttatagtttaaaagtatttgaatgattattgggatacgtgaaatttcttaaaactggaatattttaatgtagaatttgaacaaaggatactttctgattaatgatcaggaatgcattaacttattacctttttgacttaattcctaggcaattaattttgagtagaattgaacctcttatccaaaacctctttaaaagcatgtttccacccttttcccaaggacaagaatagaatggaatctgtattctgcaggatttcatctggatgcaattttctagattctgcctccattgcactgaatgtaaagttttcttgtgtttgtgtgtgtttggtcccaggctctgcctggaccccagctgcagcagcaatctggagaagacacttctccagtgcagccagtttgtttttttgcagaggagtcatcaatgcaaataggattaggaagaaaatgcacatggtctggccgtttattgccattttcaatgtataagcttagtttgttagcacacagagtggagcagaaatcactattccagacccttgctgtgaagtttactgtttcaatacagtgatgatatctgttaggagaaagctacaaagtgaggtagactttaggtcacagtgttgacattgtggatatattttatggatctgttgacttaatgcaagtttagaaaacaggcttacatttttaattttcttcctgtctgctttggttacatgaagctggataggcaattcctcttcttagaaataaccattggattcttgtccttgggaagagaatggaaatagcctttaaagaggttttggttaagatgttattataccttggataagatttaaggcagtgtttaatttttttttccatgatccatgcaactgtatgcacaataaatttatatggtgtatttatcctttactgcattctgtgtaccttgatttttttcttcattgtgctctcatatttcctttcctttccctttcctatcaatccaaacctatccactatatcctgtccaccttaatctgtgcaccatcctatcctgtctaccctatgctatcctgccctatcctgcccgactctgttctgtactcttcagttctagtctatttcttttcttttttttaaagaaatgctggatgtggcccattatatttattttaagatttaccatttgaaaatcattgatatgaaggtggcagattataataaataaaattaccaaagggcttggatgttatgtatttcttgagtgtcatctgtctctttcagtggacgtcagcatgctgttaactctcagttattatgtgtgccccatggcttgtttgctggcatagtaggatgacaaagttaagtacctcattatgagatatatacggttgttgatttctaagttatcgttcttccaggagagtttttaactaggaagtctttatcaccctgattctcttatcattgtgtaaatgttgagtagtctgtttgtgtatccggtgatgctaataaggtctgcattttcttagtgtaaattatgccctacagaatgtttaattctaggatcatgttctcctaccacgcagcgtgctcctggccccctcctgctgccatctcctgatgcatgcagagagcatgcaaacccattgtaacactggactaagtaacaaagggtttccacctctaagttaagataaacctgcctcagaggaaaaacaaacaaacaaacaatcaaacaaacaaatcaccaatcattctagtatagttacaaaccacatggaaatgatcgtggattatctggtcttggtcatcttttagtttagatactttagtattgactttgaccaagataattttataactgaattttaacctttgtttttatattataaaattagaatataagttatattcttgagactcttgagagtacagatactatatatggcttgtatatattgtagaagccaactctgtgccaggacataattggttcttgataaatatattgatttaatttgaatgtgaattgcatattaaatactgagactttggtaataccataataattaaaaattttgctaagtgcttactatgagcaagttacattcatcatttcattgagttcccactactattttataagagtgaacctttttgctagcagtaattttaatttacacctttaaggatttatttttaaatttacataaactgaaatttactttttttgggtagagttctgtgaattttgacacatgcatagaattgtatatctactttacagtggtatgattaccacagtcaatatacagtttcctcactcacccggatcccctcatggtgtctctctctagtcaaacctccttccaactgctaacctttggcagccgtattgatctgtttgccgttgctatagttttgctttttctggaatgtcatatacgtggaatcatactggatgcaatttttgaatgtagcttcttttacttaatatattgcatctgaaattcatcagtgttactctatgtacctatctatcagttgttcatttctttttattgccaagtagtattccactggtgtatggatgtactatagtctatcccttcattcacagaaggacatttaggctgttgacagtttttggcgatacgagtaatgtggctatgtatctgggtgcaggtttttttgtgagccataagttttcatttctattggctaaatgcctagaagtagattgccaggtcatttgataagtacaggtggctctccatatccaaaggttctgcatctgtgtattcaaccagcttcagatagaaaatatttgaaaaaataaaaattcttagcctaaggtagagaggaaaaaaaataaaattaaaatatacaacaataaaaaatgatacaaataaaaaatatagtataacaactatatagcatttacgttctattaggtattataagtaatctagagatttaaagtatacaggagagtatgggcaggttctatgcaaatagtataccattttatataagcgactcgagcatctgaggatttgggtgtgagaaggggtcctggacccagtctctcatgaatactgagggacaactatacatgtttaagaaactgccaaactattttctagagtgactgtaccattttgttttcccaccacaatatatagggattccagtttctctaaatccttgtcaacactatattgtcagtatatgtgtgtgtgtttagttgtagtcattctagtaagtatgtagagatatctcattatggtttttttaattattatactttaagttttagggtacatgtgcacaacgtgcaggtttgttacatatgtatacatgtgccatgttggtgtgctgcacccattaactcgtcatttacattaggtatatctcttaatgctatccctcccccctccccccaccccacgactggccctggtgtgtgatgttccccttcctgtgtccaagtgttctcattgttcaattcccttctatgagtgagagcatgcggtgtttggttttttgtccttgtgatagtttgctgagaatgatggtttccagcttcattcatgtccctataaaggacatgaactcatccttctttatggctgcatagtattccatggtgtatatgtgccacattttcttaatccagtctatcattgaaggacatttgggttggttccaagtctttgctattgtgaatagtgctgcaataaatgactactgatgttgagcaagttttcacatgcttatttgcgatatgaatatcttggtgaagtgtctattcagatattttgcctaattttttttttttttttttttttttttttgagatggagtcttgctctgtcacccaggctggagtgcagtggcgctatctcagctcactgcaagctctgcctcctaggttcacgccattctcctgcctcagcctccagagtagctgggactacaggcgcccaccaccacgcctgtattttttgtatttttagtagagaccgggttttaccatattagccaggatggtcttgatctcctgaccccatgatccgcccacctcggcctcgcaaagtgctggattacaggtgtgagccactgtgcccgtccatattttgcctattttttaaaaactaggccattttcttattgtcaagtattgagagtactgggtataagcctttcatgagatatatgatttgcatacgttttctcatagactgtaggttttcttttcagtctcttaatagtgtcttttgctggttcttaatttttataaagtccagtttattaattttatattttatgggttgtgtttttgatgaggtaactaagaacttattgtctaacccaaagtcatgaagattttgtcttgttttttttcctaaaagttttatagtttgagattttgctttttggtctgtgatttatcttgagttactttttgtataaagtattaggtatacattgaaatttgtcttttctgcctataaatgttcatttgtttcagaagcatttgttgaaaagactattcttactccttttaactgactttgcacctgtgtcagaagtcaattgaccatatttgtgtagttctgtatttggattctttctgattaaagcttgtctatctttctgccaattgaggtagttacttttctttttgagacaggatctcactgtgtcatccaggctggagtgcagtggcggcataatggctcactgcaaccttgaactcctgggcccaagtgaacctcccgcctttgcctcccgagtagctgggactacatgtgtgtgccaccacgcctggcgaattttttaaaattttgtagatagggggccttgctatgttccccaggctggtgtcaaactcctgccctcaagcgatccttctgccttggcctcccaaagtgttgggattatacacgtgagccatcatgcccggcctgcttactttttaaacctcagattactgatgaggaaaaggagtcttagtcaaattaagtaccttgcctaagatgattcagctagcaaatgattgcattaatacttaaactagggcgagttttctgactatgaaacttgtgctgagaagctatgttagcacctgttcttaccttagttattttgcttctggttgaaatgtttggttttaagaaactgaacagtatggttttggaagagtacatatgacaagtagatcacagaaaattatctgaaataagaaatctaaggttttttttcgctttctaggccattaattaccagacataattaattttcaatatctttaacaaggtataatattcttttctaaatccaaggtagctgtatatcatttttctttattttaaatagagcaacataaatatatgttccttgtacagcaaggaaaggatgttagggtttgtgcatgtgagaacacagatgggctaagagtgatttgcatccagagggctcatgcaaggaacttggtaagaggttacagagtgacactactgtggcagtgaataataaattaacatttcaatattggcaaaccggagaattttgaagaatgtcatatttagttaatttctgattattacaaactaagcctgtacattgatttgttaataactaggcatgcatgtgcacgtgcatgtgcactctctctcacacacacacccccccctatatacatatatatgttttttgaggggcatctttagtgatttcagcctgggtactctgttctaatatatgctcttccttctgagaacccatttactgtcacagatccaactttcttccaaaggcaaatgactccaaacccatatctgtgttgtgatccactgttaaacttaatttccctccctgggctctgacatctacttagctataggatacaattactaggatgaccttttgatattggtaacttatacacaaaactgagttccgtttctcctcatcctcacaaataagcaaccattctcagtttcccctttattttcttgaagatagacttgctctttggaacctcagaatcatttttgactctctctttctgggaccctggtgtggtcaaatctgtagtcaatttctgctgattgtctgtgcctggttggtttggacctagctcctctttccccttgcagtgcctgccatggccccttgccctcttcttcctcccttgatttacgttcacctttttaatgcctgctagcttctgtacatgaactctttgcatgcccaacccaatctttcttgttttatgaccactggtcttgctattcattccatccatggtgtcttccttctcccccactatctctgcagattgaaagctaaagtatagctcactgccatctcacgtttgaaaccctccagttcactccagtcaacaaactccatctctcctccgatctcagcccatattgtgcccaggccagcagcgtcaacagaatctgggaacatgttagaatgccccactccagacctgctgagtcagaaactctgggggtggagcctagaaatctgtgtgtaacaagcctttggggtcattctgacaccagctaatgtttgagaaccagtgtactgtgtaaacccagattcacatactcagtgtgaaaggctgagtagccctacctctcttcagcccacttccattgctcagcctctgtgagctttttcattttgaatacctgcatctccttttcttagtcacttctaattcctcatttaaaatgtcagtcccaaaattcacttcctcgaggcagtctcagttcactgtttgagcaataggtgcttggtttatattctgctcttttctccttgttgatcatgtttttctgtaaggactttggttgactgctgtatgtatgttctgtccttttgacagacatgtgttcccccaaaatggcacaggatatatttggtacaaatttttggtctgtcaatttcactaataggtcggagaaaaaaaaatttaactgtcaacacagcaaatatgtccctgagtagaaaggaaaatgtacatgaatagccaagaatgaagatgtttgtgctagggcagcttttggctatgtcttaggctactcagggtattcattaattccctctcctctgatgttggagggtgtcctggttaaaaagtctggggcacctctgctgacacgaggaaagggagcacgtactgcagagagggggaccagttttgacttcggggtccttcacttcttccagtgattgattcccattgtttgaccttagtttcctgataaaaaattgggataatactgtctacttcatatgattgttatattgcaaggattaagtgagatttggtaggtaatgtccttgtacaatccctgtcctacattaggtgctctataaatggtagcttttattaactctaccaggacagcacacttaaagaaaaaaatcattccacaaaagcagttctatttgctgcatagtaggcccttagtaaatgtattgaatgatatatatatatggcatttcatggttctggtctgtgcaaatgtcctaatttgtacagggcttcaagttttagtgctttataattgttaatgaatggtaagaaatattacttgactttttgacaaatctattgcatttcttaaaaattttccattcaactttagttttaatggatgatagcttactttctaatagtatctgaaaggtttttttccagtagaataaattaggctggttaaatgggctttttgacacaatgccctcccaagaatgttgtttcattgccaatggctagtttaatcagtattattgaagacagtttcaaactactctgctacttggttctttatttagtttttattcttttcctaacacacctaattaatggaactgtccagtggtctaacatggagaaggagagaagatgacattatgaaaagtttaatcattataatagcagctaacgtttgtctggcatgttgtagtttacagaatactttaacatgcattgtatcatatctcacagtgtaggcattactattatttttattttgctgataagagtaaaaagtaggcattactatttttttattttgctgattagaaaattgctgctctgcttaatgaccaaggtcatggaagcagaaggtaaaataaaagccccagggctgggcacggtggcgcatacctgtaatcccagcaatttgggaggccgaggcgggtgggatgacctgaggtcaggagttcaagaccagcctggccaacatggcgaaagcccgtctctactaaaaatacaaaaattagctgggcatggtggcgggtgcctgtaatcccagcttctcgggaggctgaggcaggagaatctcttgaacctgggaggcggaggttacagtgagctgagatagtgccactgcactccagcttgggcaacagagagagactctgtctcgaaaaaaaaaaaaaaaaaaagcccagaagttgaggatagtatggttatgtaaaagtttcacttcctcatgattaggaaaagaataaaaactaaataaagaaccaagtagcagagtagtttgaaacggtttaatgcatgtagacaatttacagtttcatgtcatcctaaagcactgcctcccacagcttatttatgtggaacaagagactgaccacctggtttcacaccttgattctgccacttcctttctacatgatctcagtcaggttgttcaatctctttgagcctcagtctttccatttataaaatggggaaggataatggcatccacctcatagagttgttgtattaaaatgagttaatatatgtaaaactattagaacaatgcctgggacatagaaggtgctaggtaagtaggtaaatgtcagctattattattttttatagaggagtggctgaagtgctttatatgaaaggtgagtatacttagccatatttataattagagaagtagaaatcagagcttctataagagttcaatagtgcagaatgtatattttgcatcttaggtattgatgtggtgtggctgtgtccccacctaaatctcatcttgaactgtagctctcataatttccacgtgttgtgggagggacccggtgggaggtaatttaatcatgggggtgggtttttttctgtactgttcttttaatagtgaataaatctcatgacatctgatggttttataaaggggagtttgcctgcacatgccctcttgcctgctgcatgtaggacgtaactttgctcctcctttgccttctgccatgattgtgaggcctccctggccatgtggagctgttagtccattatacctctttttctttataaattacctagtctcaggtatgtctttattattagcatgagaacagactaatacaggtatcatgccctagtctgggttttcctgtagacttatgttcatttactaaccttgggataaatgaaaatttggagcatgcctgtatgatttctctttctaaaaactcaaaacccacaaaactacagtaaggtgctgtcccccttccattatccatagacccttttgcctttcttaaaaaacacatgcacagcactcacacagacacacccctgtaagacataaggtaccttggccattttcatgaaactgttgttaattcctttctttaaaattgaagtcttttaggattttaacaaatatcctattcatgaagttttgtctgttcttttcttctggatttcacaactcacctgttctaggagagtcttcattattttggagaaggcttcaaatctactatcttcaagcttttttctttccagtgcacccgtctcatctcatgtaacgtggtgctgggaatataagactgagattgtgatgctcacagtttttcttctttgtaattttctgtgtcttgattttttcccccaatgaacatgtatctatttcacaaaatctattttactgttaaataaaattttggtaaacactggaagtaggaaattaaaatgtgcaaaattgtaaattatcattacagtttacttatctttcttgtagataccagatacagaatgcttttgttttattacatctttttctatatgcaaaccgtaagctgagtgtagcacctggttatgaaattttgtacttatagaatatattcacttttattggtggctataatcaagatgaaatgcttttcttaataattaatgttaagaagagaaatgtaaactttagacaactttatgacttctctccagaggatgtatggatgtgactgggtatgtgatttaaaaaatttttaaagttctttggattttttttcttttgtttaaaggtccttaggcgtttgccttggcttgctgaagagtaaggagaaaaccctgtaaactcattcactcagaataggatgagagtattgtagatttcttttctcctttgagacaattttaaaattacaatggtcttagcctaagtggtccctgttacggcttctctcttttccatgctcaacacagcctttgaggaggggctgagggacacgccacctgttttcaagtgtatttatttctttatgccttaatatgcctagtgcatctcagaatggaaatgtcctggaaattgaacagcttcatagttgggtggccccatgagcatttaggaaatattttgtgaaactgttgtggtcatcttgtgtactggttctggtactttaatccatcattttgggatcatagctcttctgaggaaagagcagccttgcaccttcaagcctttctatcttcaatcagttgggtttgcgtattcgagctcattccagttcatgattggcagtttttgtgttaggtacccactctgaagtgttccctatcgtttagaaggtagaagtagtcatcagtgactgaagcctaatttagattcttaaatcgaaatcattgttgaagaatactgctcctccactacagacgtcttgtgcatatcatgagtgtcttcatcagagaacaagctctcacccggtctctcataatataaaagcatttttaatccctcttaacaggtgctgccgcagtttatttataactaatgcattaaaatgaaaaatactgaaagggtcctaagtggaaggtggctattgaaatattgccatatttaaattatagaattttgtcaggctgatttgtggaaaggacgagtcaatgttggctggtaagtgatgtactcacaggtttcctgtaagttcgggtggtgctttccgcagtgtatataagtgggttgtgcaaaatctgagtcctacgattcaattgattttcctttgcataatcataatcatattcatatttggtcagctttcatgctctttgatatttctgatccttatgaagcatgacaaatgttagaactcttttggccttctagacttattgcagcacaaaaactcgagatcctaattgaaagaattttgaagagtgtttcatttaacccttttcttcctagtccaaatttgatctcacacatggggaaggtaaatgcacaccttaatattggtgcaacatgttattctgaagacacgtgctaaacatttgaaagtcttgttgatttatatttccaccatgttttctctttcctgaaaaaccttagccagcgactgaagtagttgggttgtattaatggatgtttatgttgtcctgtgacagctggttttgctaatttgtttttacagggcagtttgtagtaaatgaatggcatgctgaatattttactgagatttcagattatctaaagaatattttccggtttactaattggtagataatgctgagtacattgatgttgacatgagcaaatggatttaaaatgatttgaagtgagcttcattaaaagatgctctaatcacagccagcaggaaatgtcaaactagttctgccttcattcactctggtggacaggaactgttgcagacttacgatgctacaagtcattgcagttttgattttggggtgccacagggtgggggaaatggtggaagtttttttttcatagcttttttggctcatcatgtctttaccagaaactaaataacaaattactaattacctgtatggctaaatgaacattctctgaaaatcatagtcacattgctggagtcttataatccattatgggttgaatacatggaagtcatgtttgttgctcactctgaactagaagtctgtaaattacttgttatccattttagcagaattctattatagaattaaagccaatggtgctcatcaaaacattaagaaaaacctaggcaaaggcattccaaattcccaggttaaaacttacaacactggttctacttttcctgcctgtaaaaagttatagaggctgtttcatcaaaattgaatgcttggggaaaaaatatctaagggaggcagattctgaagtaagtctcttcaggattaaaatctgtctttttctgatatcgactgtgcgactttgtgcaagtaacctaacctgcctgaaccttcgttttcttgtctgtaaaatggggataataatatctatctcatgaggtcatgggactatctttatatctatatgcttttcatggtagaaggtacttggtaagggctctattagtgttagctattgtaacctaaatacatttatttccttcttttaatacctggggaaaggttgtgggtgtcatatgccaagacattaactagacatcttatttctactgattgtaagtttactaaacacctctcatgtcactcagaacagagctatctagaaccagtaagttcatcatatggagctttttggatctaggatataatgagactagcccaaattcatgcagtaagttattgggtaatcttgctgcagtaatcttgtttttctctttgactgttatcaaaatgtctttttcttcaagcccggatgtagtatgctgaggtagtagcactcataggcagagatcaacggctctaattatttcacaataaaaataatatgatgcaggagtctgtataatgctaatgaaatctaggtacatggcaagcaacctgttcttttcagcttcctcattagcatcagatttgcctagatgcccagataagtggttgtacaggttgtgtatattttaaatagcattcctctgggtcagcccaacaatgctgtaaacttgatgcccagtagataggagtgcctcctggaaatttcttgaaaacatggtaccagattaggagatcgataaaggatgctgatactggcatagaatgttctagaataactgagcaacatcttttaagtgatctggtattgttggttcaaagcttctggctgtattacatataaatttggcctatgtggttgagaagaaattgccctactcatctattcagtcagggttctgcaagacaactgtgaattgttttctttttctctttttattcccccttaatgccacagtgtgttttgaagagggaagagtgaaaaacaaaaaagttccacttgaatgaccctattagctttacactggtttctgtaaaccatgccagaaatataataatctatgaggtctttgagtttaggacacagcctctgttgacaaatataaaaaatggcacaccagactgcagatgtggattgtgggttagtgtggccttccctcatcaatggggaaatggagcttaagtcaggcttagaaaatgagaaaaatgcttaagggacatgactaatgtctccaacgtgcagtacactacataaacctattatgcgctttaatttaatgttctccataaagattcaggacctgtcagtagaaggaaagaaacaagcaatccatctttagtgaactgtgaatagacttttatattttttaaaatacacacgcacctataacatacttttcccttccttcggttttctccacatctgatccatttcctgtcttgaactgccactacctaggctgcttgtggattgttttgttcagtgaaataagactaatgtgttaaatatttaacattgctaattggttcaatgtaaaggaaaagggaatagatgcagattgtctccagtctctgtcagcagacttcagcaaacaagactggaaggtctgaattgaagatgtttcatctcagggacttaaaggcctatgggataatatagcatttcttgcaagtggcaattgggccaaaattgggagaaaaattaatttgcacctggcagctggaaagctgaggatctatttctatagaaaatttggctgcaccccgcccccggcccaaaaaaaaaaagctttttgttttcaggctccaggtgtagattgaaagataacaaaatggatgtgacattttactggtcttatctcctttgcaggttgggagcgttaaaacacttagctgtacttcactaaagcaagctgaaatttgcagatgattgtaattgatgagtaaggaagtagaaaccccactgggtcagtgagaatttttccattatgaaaacataacctttcataggagaacccaatggcagtgaaatgtcagatacctggatttttacaaaggaaaggaaggcaaatctgtattgtttcctataatacaattctgaaacaggaatgtacatatatatctcattctcttttgaggttgttttgttgtctgctgtgtctaggtgaaaagaactcacagtgacatcagtttttgctttgaattgattttttctttaaaccagaggtgaatggcacctaagaaattatttaaatcaggatataaaaatattatatgttttaacaaatgttgacattggtagctagtctgagctgttcttttttctggaggaaagacattagtaaactgaggtggggatagaattgtttcaagggctgtggtcagaggtgtctaagtgctgaaaaaataagtttgatgagttaaagcagagggcttccagagtggggtccacaggatcaatcaatagccttcaggaggttggtgagtccccagaaataacatgcaatattttgcatgcatttttttggggagagtctgtgttaaaactagattcttaaaggggtagagaccatgctgaagtaaagctactcctgccagctatctccaagtgcctattttacaggagcccatgagctctagctcaatttatttctcccctttcttcccagtcaccatccccttccctagtgggcacctactacttcatccctcttcatcctgcttcatcccctttccttctttctcccctttctattcttgatcccactgcctttcttatgtgtggaccttttaaaagaggatggtctaggtgctagccatatagactgccacgcaaactggaagggcctctcttaaaccttcctgccttgaaagtcagggaaataggctcccagcctctgcctggacagaacaattaagtcttgttgtgattataacccttacctcgttgatattcagatacttttcaacataatcatgtttttctaatgtcccttactttcctccctcctcctcctccacatcaaaaataaattatttgtggaatatttaataggttcatggggctctgctctggtgttatctgttttaattctgtgtgagatgagatgcggcacttgtcagcagaggccgctgatgatgtcggtacaccttactgagcacaggtcacggtggcctgcaagccagattgggtgattcagccaaaggagcgtcactctgtcgagtgggagaactcacagataacccgaggtgctcacatttagccctgtatgtagtgcaggtgatatgcaaggcggttcctttccggtttaactctcgcctcttcctgggctgcttttcagccattcatttgtccggcggaagcagtcagctttctgaaatagatcacgatttaattgccgctgcctccgctgtactgaaatgaaactttcgaaggtcaccaagcatcagtggcccttagttaagcattatcttctttgcccgccccacagtatttggcaccattaacttctgtttccatttaaaaattcctccatttgttctgcagcactgcctgtacctctttggatagcattatttggcagcacttgggctagctcttttttctccctctaccggctaaatgtttcccagtgttttgtcctcggttatttgcttccctttttccatgggttctctttggtgttctagatcttattccctctcacaacttcaagtgttgcttttccctacagcccaacttttttcttttctttttttaaattcctgaactgcattgtcaactacctgctgttcctgctacccctgggagtccccctgccctctcaaacttccctgtttaaaaaagagcttacctccaactattcactatctcacttcccaagcaaatatacaaatatactcaaaatacaaaaccccaaattagaaaggctgcccctatggccatcaccaaaaagcaagtccctcaacaggttcatccatattcatttctttttcctttcatagctcaccgccgttcacctaggcagcccctgaacctaaatctctgcagacatcttcatcttcttttcatgcttcatgtgcaagtagttgccagatcttcctgaccttggtaataaaacattgcctacatccggacttccttttgctttgctcagggtcagtttcttattccctcatggctgtggtctataccattccccgttagctgctcacctgttttcctaacttgcgattctccacagtttgcagtttctcacctttaagaattttgttcagcttttatcttctcccatatccattctttgagatattatttaccctttaccttcctatatgaagatgacaccttccctgacaacctttgctttatctcaactacattattattttttgtgagatgtatactatccaattatgtttagagttttaaatcaccctactaaaccacaaatattgacagattgggagctttattatatatatacttattatataatacatgtatgtgtgtgtgtgtgtgtgtttccatttccattgcacagtaccaggtacacgttaggaacccagtaaatctgtattgaatgaatgaatgcctacactgaaattttacttcaggttggttagcaggcttagaagatctcttcctactaaagatcttttgctaattgtttttggagcctttctatttagccatgcaaattagcatgggttcataggcccagaacctgaaataaattaatccgtacttgaaaggaacaaggctgtggctgtatatggatttcaggaaaaagaaaaatggaaaacattgagccagtgtccagttgatataagtgcttccttgtgtttttttttttctttctttctagtgcataggcagtataaagttacttttacctccagtgacccaggccagaatcatggcagtactgtcaccagagctgagaaaagggagaataagaggtacattagagaaagaaagtatgatgcttcaccatgttaattactcaataaataacttttgttattattagggctgttattatcatttctagttccattatttattgccacttaaaacaattctggtgacagtgcatttagagatcttcagagaaaattatgtaaatccagtagcgaaaggttaatgcatggtttttggcccaagtatttctatagcccttggttacttgtgggagaggattttgtcaagctagtaaagctgtgtgtagttgagttgtattgttttgggctatttgtaaatattgtattgtgtgacatacttctagcacctgaaaagcctggcctttgggactgattttaagagctgttcacgttgtgtgaaccaatacccatggccaaagggaaaaggtttgcgttagagagcaaactgaaattaaaagggtgggtgtgcggtgtccttcaacccttgtgtagactagctgtgcggcagcaattgctgcccagaagtaagactgagaagcttacgatagcctaaacctcaggagagggggtttggaaggtaggggggctttctctagaaacagaatcttttttgtgagtctacctgccaactagaaaaaaagggtgctaggtgttcagatctgctttgcaggttccaaagcacctaagtacattttcagttccaaaatttaaatcctgtttgtgggaaatcagtagagggtttaatagaagcttaaacaaattatatataaacacacagaagtagtctggcctgagtatggaaaggccagaaagtctgagtgttatggtgaagtagtaggaggtaatttatttttaaaatttattgaacccactgaagcataagtgtgtgaggataagagaaaaccatatgcacatatggtccagaatgaaattcttcagatttctgagatggttgcaagtagtgactaaaccattttgaattaactttgtgtgtgaaagtcttttcaatccttccaatttagtctcttcaggttcactagtggtggaaagaatcaactggtccatgccaccattagactggactgccagcagggaagtaagagcctccttatctttgctcagagtatgctctctctctttttttcactttcttctctctttcttttctttctctctctctctctgggaagcaaaggggatgggtgaagatctctacatttcttttcttgagagaaaggcaggtctgagtgaaaatttattcatagctttttcatttctctttggaaaatgtaattgtgacattgtagctataaattcaatgtttaaaaagtataaaactctatcaagggaatagaatattttcaccttagttatttgtgaaagttaggccttttgttgggtggggagaacacacgtaatacactgatagtagagagtaatctgcagtaagatctaatcagaggaaaatctgaaggaatcagaccagagacagatcactgaccggaatacagaagtgcattgtgcagcaataacactcctttccattcattattgcagttataattatggaacccaacatatttaattggcacagtgtactcttctctggtgaatagattgcattgttcctgttttaaaaacccttatgcatcatgaatccatgcacatgttgctctttggctctcgagaggtttctttgtttacatgatgagtgattaaccgaattgtgaagccttgctatgcgttgtatgcaaagatgaagtgaaaaggggtatctactctgttctaactttgaagggctttgattaatttaaaaaatctattagatctttgtgaggatgtatgccttaacttagaaatatgtaaatggaaatatcagttgagtttgatatctgggctagtcttttatctgattctggaggacctgttaatggaaattatgtctggtgggatgttattggtacatgcattagattacaagccacagaagtggtattcctgaagaggtatgtggttactgaacccctagaaatgagatcaatgctaaatgtggatggggggaaaacactctccccttatataggactttccagtggattccagggacttttgtctagcttgcaagataaaatgcttgcatggactaggggcagggtataatgtaataataataataataataataataataataataattacagctaacatttaggaatacctactgcctgccaagcaccctgctaagtaaacattttacatttattgtcttatctaattctcacccctattctagtgtctactattatcctcattttactgatgaggaaactgagcattggatagattacattttcttgtttgaagatcacacacctaacaaagctgggatgtgatgatctcagttgcttttcacttttgctgcttgctgtagaacatattggtaaagcatagctcattgttttaaagcctttataattatagttacgttgttcctcactacatatgagcatttatacttttgaaaattaatcagagctcagtgtaattagagagagagagagagagagagactttagtatcccccaaacatcagcttattgcttccacagctgagacccacaggggaaagagaagagtacacccataaatattttctgtaaacgccacaggtagtcatgctgctcttggatgcaaaaggtctctagttcaatttcctgctggaatggattcttcacaaataaggataatccctcattttatgtttactcacatgtattccttctgtattccatactgtccacattgggctttgcagtttttatatattcttgccagaatgcacttattcattagccgtttttattagtgttacggttgagatgacattttcccattctaaactccaattttctgtgacttttaattttacaaaacaattacctatcaggctgaaactccttaggctggttttctgctcagaaaggaggtataggggggaggttttaaagtctgttccacttttcttggcagcctagacatttagattcatgtaagtgctctttaaataaagttgcaattgcttaattatttaaataaatgggagctgaattatttaaggatttgctggcaagacaaaaggttctgggttttctctcctacccctcactcagaattttcagtcccattttgtgctggctaactaagaatgaatttctcatttgtattttgatatatctgcaaatccagcaacatcttttggagttcttaccctggctaagtccatggattttaaaagtcaagtttgaaattttagattgtatccaaatactttgagtaatgtctttttatgtatattatggttaaaatgcacacttttaccagattcgacttatcgagcacctctaatgtgcagaggaaaacagcagagtggaaagaatacagttttggaatttgaaagactggatttggattctgactctgccacttatgtggctctgtcaccgttgcaaagttatttaccctttctgaggatcagttttctcttttgtaagccacctcttagggttgtggaggagattaaggaaatgtatgtagaagcccttaatatatagtacctggcaattagtaggcactcagtatgtggtaactatgaagtctgcacttaggtactatgttaacaatcaggaattaacaggtggataagacagaggttcctgtccttactgagctgatagtctggcagtggcaaagcattttaagcagagggaacagcatgatcaacagtaggtttgaaatctagaaagtgcttggttatttgggaacctgttaatgttccagtgtccctaatcttaacattaatataattggaaatattacattgatatggtgtttttgaggtttataatacacatgacatacattatttcacttgatccttgcaaaaatcctatgtggcagacagggattactgtctctattttataagggattttagtgatttacccaaaatcacacagctagtggaagagccaggattaaagtccaggttttttgcatttcctatccagtgctctttctactgtaacattcaactagtcctatgtcttatctatatatacaagtgctaagcctttaatgataatttaatgagacttttataatgttctttttacttaaacatttttactcaaactcatctgacttaagataaaattatataaaatcaaattgaggttgtactttagcctctgtatatatgtcacttgtgactgtaattaaaaaaaaattaaagtgtagttattctcctccctgaccctatcaagtatgtagaatctaaatgttacctcctaattttactttatatgcagttttttttttgtatcagtgtcttttaaaatgtcttacagaatggttaagtcacatacttttatgtatattcatatctggtaagtatgcaagtaattgcctcatctacccagttcttactgtttatctcctttaatggcaataatgcatctttgggtgtattatctttaagggcccacatttgttttactatacttgattcaaacatgttggatccttgctggaaactattaagattatggctcctttaccatcattaattttaaaaagttaagtgctcaggagagaaactaatcacctcaggacatcaacttccattctttttgctctttagaactgtgccactatgccagttgtaggatgttcagcatgaaaggctccacttctcagagggaacttatttgaaccctggagttgcttctggatcccgccagttattggcatttccaaataagaatgcagagcacgcaacacgctgctgtcaacttgatctttgaatacaaagttgtggatagaaatgctaatgaaccagcgatttgtgaagtacttcaccatgttggccacatagcaaattaacaggttctttcctcttagggggaggagcttttgaagggactgtctctttttgttttttgtagggaagttattttaaagttgttttgtttagttagggacaaggctcatcaggtgtgagtgttggctactctggccacagaacatgtgtgactttcctggcatattcagagaatttcttaagaaacttgactctactggaatcttttccacagttgcaattgtcactgaacattccaggggcttcatctacattttgagttcttagtacattactatttagagatatatatgggcattttctaccagagaccaatatttctctctctctctatatatatatatgattttttttttgcctttgaagtacctcttttcttagagatacttttgccaccaccctccacttttttttctttttttcccaaaactcactgaagacatccaaagaaatacatgaatttttcagtgggagttgcacgtgatttttaaagcatcttttatgcggtcttttaagtttctgttttgattttgcaattggttggaaacgaaggaaacctcaagctagtagctgatgagatccaacaaggacttgccatgttaataacaagaatctgaaaaaagaaaagaatgtatctgataaagagtctagaaaggattcactgccactcctttgaggctttttccagtctcacctattagagaagttattcactctatcattatggattgaaggaaggtttagaaatttcctctccagcacttccaagaaggtgaaagttcttattttatgggctggcaaggaaactgggagagaaagggaaatgatttctttctaaaataccagaagatagggtgccacacttgtcccttaagatagatggacagatatacaatataagctcctgtacgaggcacatcttttaggatgaaattgactgaagaattgatctttgaccaaatcctgtttgcctgacctaaaatgaactcttggaaagaccaaagccttattggctgcaccaagagaagataggaccttgcccatggatgggagaatcctggcctttagtcagagacagcaggtatgtatgttaagtccatttggtttgccattttgccagtagctttcaaagaatttggaacttgatatgatgtaggatcttcacattttatgagattacaatgaaactcttttgaccctatagcaaaaccagcttttaagaggatgaacgtattttcaaaaatttagccctacagtaaacatgaaatgttgaaagagaaatgtctgtctggcaaattgtgattctgtcccaagaggaggaatttacttccattttgatttacctggcaggaaagtatcttttgcaggcactactgaagtttttcttaaattcctctgctttgaattgtgtctctgggagctattcatctttgtcacctgttttacttctgctatttttagccaagtgccaaagaccttacagcttcctcaagtgaaagataaagaattaagatctgttgtaaacaaaagctcatcactttttttttatgctgcaagagctcccttcaagttttccttagagtcaactttaattgcttagacttagactctccaaaagagagacctttgttaattttgcttccaaatccatgaagaggcaaggctttgttttttttttgttttgttttattttttttttaaagaacattttagaaaaaatgaccaatgaatgaacttctctttcatctctattctcatgtcaaatgataaggcataaagcaaatggaggaccttctagacctagaaggatatatcttataagtgaatccattcccaaaagtgccagtgcttgtttagctgagtcagttaatcttgacactaaggaattattacagtgtttaaatttcattttttaggttgtagcatggcaggaaatacttgatgaggctctacctctttgacttggatttgtgataagaaagtaagttttgggagggcgaggtgggcagatcacttgagctcaagagtttgagcccagcctggccaacatggtaaaaccccgtgtctactaaaaatacaaaaattagctgggtgtgttggggcatgcctgtagttccagctactctggaggccgaggcaggagaatcacttgatcctgggaggtggaggttttagtgagccgagatcctgtcactgcactccagcctgggtgacagagcaagactctgtctcaaaaacaaaaacaatgacaacaagtaagttatttggcctaactcatagccacttctggagaaaacagttcaaggcacatagcccgtgataagtgctgctgtttcttttcttttcttgttttttttttttggttttttttgggggcgaggggggtatagggtttcactcttgtcactcaagctggactgcagccttgatcttggctcactgcagccatgagctcccaggctcaagcaatccatctcccaagtagctaagactacaggcatgcaccaccacacccaactaatttttgtaaattttgtagagatggagttttatcatgttgcctaggttggtctcatacccctgggctcaagcggtctgcctgcctcagtctcccaaagtgctaggattgtaggcatgagccactgcacctggtcgagtgcttccttttctatgaggccagaatgtttctatcacacctagactaactagtaatgtaattttatctacctggttagttagataaaatttatctaattatatatatttatactgcaaagcattacatgcttataggtttggcttttctttcaagaaagcaatgatacctcctgagtattttcttccatccccatgtcaatcactcccaccctttctccttaaaaattattttggagaccaaagtataatagattttacccagaagtgatatttctcaccaatgtaaactttgtactttatctcttaaaaggtggaaaaaaagtatagtaaaatattacatatgcacagagcctagagattatattttattctattattcttccaagttgagttttgtgctggtcttatttttatctctccatctatgtttgcagggctgcctgtttcccccaagtgttaatgtaaacacattttattttgagacagatcagctcacttccctctggaaatccatccctataatgtggtaaacctcaatataactctctggtccgaatgacatttcataactgtgtacaaatcaaacatactgttgatattaaatgacaacttttaatgcctatgtcaacaattcacttaagtctcatttcattaaaacgcttctgatctggggagaagctgcttgtctgagtagataaagcacttgactttcacctctagtttccgggttaaagtgcagttggtgagctgtaattcaaatggattttataggttctgggctaggagactggaacaaaagtctggttcacataatcagaggaaatcttgggtcatctgaacaagtgggtgtcaaaaccagtgattttcactttatttcttgtgtaagtgagcttgtctttgtggatgattcccagcccccccaccaccccaccccgctggccccgccaaaccttagaaattttaaaaaagaaattaacgtggtcaagatagttaacaagtaaatggagtaccttctagacctgggaggacatatcttgtaagttaatccatattcattccttgaatagttctccctcggtttctcttccagaagttacagccagctttgggtcctccattcttgccttgaggaaatttccaaaaagtttttttttttcccctccagccccagatgctctcctgactctttccaggactctctaggggactggcttttgatggtttcctgagtgtaatcctaattccaccggtgttttatacatattgactcctctgattgtttccctgtagttaggaaagaagcccaggctggttaggaacctcctcttatatgcctaaattagcaaggaaaactgtttcccccatttccatggtcatggtgtctctacttcaagaacaatctctgtggggattgctcatgtcttaaactgaagccaatgactacactatacctgttaagtggtctgtaggggatgtttgaatgaataacaatagttgctgctgctactttaataatgtcataatgtttttgtttcatacaacttactgaagtttaggacttgtgcacaaattgctacctatgtcctttttcgcctgggacctcctactttgtgagccctcagcaaatgtaggataatcaagaaggggaaattagccttgtggctttaacgggtatcttcaaatggctacacgtggtaaaaccctgggattgtgctgaattcttacatacctgtatcaatgcagaaagaccctcaaaaaaattacagccctttccatagtggaacaatcgtaatataaaataagtggctgttaggcttctttcaggtcttgataacttaggcaaggcagataattaatacaaccaagatgacagttgactataattggctgcttattatgaagtttagacattttcctcccttctatctctgggagaaggaaattgctctagcatatgtgtgtagaagacataaaacttgctacagcagtatttttatttccagattattcttaaagctatttaaaagtcaccgcagaatgagctttacagaagcaatgtaatggctcctttaggtttttgtgtaaattcagataactgaaatgttagccttgattgatgattaaaaaggaaggaggtacaccaaagctgatggtgagctctggatacaggataaaggaattggggttgtgggggaaagatctcaccatagtcccttaagttcttttatagaatttctgttgtgattggtaacgtaaggagcatttgaaagatgatcgttatttgagaaatgtttctgaactagaaacttgcaagctttgaatcctgttaatactcactggcaatgatagccattttccattccatgagatcactttggaacttgagcataattttatttctgcttcacagttcttaaaatcctgtttggaaatgtcattaggaggataagggatgtaatgaaaaatacgttttctcatgtaccaaatcaaagtgtatagttatggagctggctatctatactgaacaacagttaacaaaatgaattggctgctttccgcatttgaagttgtatagtgtaaaattcaatgaaacgttcaataactggaaagatcacatcagcatcaaggatgcatttagcaggtttcctcctaccatattactaggatagaagcacagttttagaactaggaataaaggctatgaatgaagttaaaaactgtgggaggcctggaagtagaaagataagtaggagtgactgggcctggaaacttggatttggatgcaagtgaaggaaacagaaagatgggcctgtgcggaccagtattttatgatcggtgctcttgtcagtatcttccactgaaggctgaaagttatttcttgaaactagcacctgtcacacccctccttaaggcaaaggaccttatttttggtggttgaacttgctgggtcaaacagaatcactatgcctgattctcatgttgtatggaaagacatagggaggggtgaaagcagctttttttccattcagcgtttttagcaggtttttagagtgaggagttattccatgagtgaatgaatggaatgaatgaatgaaaaaaaaaatggccaggtttgtttttcttggaaaggttttatttcctataaagagatatggcataattgtgttttccctggcataaaatgaaaaataaaatctagcaaaatgcatacttaagggatgtgtgtgcacatgtgtatgtcactataatatataatgagactgttgaactctctagaatgtttggaactataaagtttagctgttttgaaatactgctctgttagacaatggcttagggaaatacatgttttcgtataaaacaccgaaagcattttcggtggcattgtcgggaaatgcaccttgccttctaaagcagtagatgcaacttttaagaatgcaaatttgaaaaactgacaggggaaaattacaagaagcttacatattcttgaattttctccatctgagttttaagtaggctggtgttaggctggagctgcttctgattatgactcttctagggggaaaacacagttttacaggactgaccttaagtgcaaaatggatagtaattcaaagccctgagggggcttaagaaatgaaggtggcttattggttttggcagggaaagggttgtctggtaagaccattgagcctcttagctgaaaatgctgacaagttgagcagagagcatctgtgctataccaagcacaatcattattttcattggcaaaatgtattgctcacagttttgggtagtctgtccattttgtcagtaatttaatctaggttgaaaaaggcatgggatataaaccgctattgttgagcatccctgcaggcatacctggcaggttccattccaacttttaatgaggagtcttgctttatgttggggtccgctggtggcttgcaatatctattttggggcgttttaagatgggggttagctcttgaaattggacaaggtgcctgcataaaagatgatgagatattttttccctcttggtctctgctccttgttaaattggtaattaggcgagactttcagacagaagtaaaaatacagatgacatgggattgtgtctaaggtgatagcttttctttcatgggaagaataatcctgaggattgaaataaagaatttgaagtagaaacttaatacatttgagatcttctatatttttatagtaattttatttcacaatatgtgccaataatacatgacaccttcaataatgtatttttatactcctttacccaagaattaagctggtacatttgcaagaggaggaaatacatgttgactttgtgatattgctagtaaccccattctttttcttttcttgggagtggcgctccaccccaccccaccccctcctaccccccaacacacattaatgggttattcttggctgggaaatgttctgttttctataatttttcaaaatattgcagtttatgagttgaaaaatgagaaaaaatggttactacttaattttttaatgttttatatattaatcaatttgattctttagatcattttgggaatatccttggcaagaaaaagcaggcattttcacacattgtggcattgtctttaggtcagacaagcaagttgcagaaagaattttctaagctgtgtgttgaataaggagacagttaattctgaggcagccctcattttttttctaatcagatttatagcagaaactattggaactaacttattcacacttttccctaacttattcatattctacttataccatataggaattttgatagtcaaaatacgcccatattctaatcaaaacagaatgagaaagggaaacaattgccttttaagaatagggatgagaggtactcaatcatttatagttattcttatgatatgtgctgtttatggaatactgtatgccaggcactggtctagaaaactgtattaatctgtgtgcagtcgagagaggaaccacacagtaatttgaatagggaaagcttactgtgactcgttaactgtaacaaggtattggaataatgagggacttgctagtaagaagtaaagagaattgtaaagaatgtagaaacagcagatctaatgagcaaccattaccctgtgctaagaaagagcacctaagaaagaacacctttcccaagctgagatccaggtagtattggagaggacacagctatggctcactgtggcagagaagttgctgtggtgctgtgaaacttgctggaattccaccctctaatatgctggggaaaaccattcatgagaaggtgtctctttggaggcactctgatacaaaattgtctgaggagggtgccagcaaagctaccagccaccgtttgctcctggctgctctgctctgcaggatccaggcactggggaatctgtgtgtacctggagatggatgctagagaagctcagttctgtgtgtacctgtagatggatgctagagaagctcaggtgcctccagcaccatctactgataaagattaaccttgtgtccgagggtaaaggaaaaacatttgaagggcccagatccattttcacagagcagacaaaaagggtgattttgaagctgagaggcaataaactgatgatgggcacagaagtctttgctgctgcttttttaatcctaaagagactagaagtagtgaaatgggattatatatcccattttacaggtgaaaagatttctttaagcttacagagattaagtgacttgttcagggtcatatacttaataaatggcaggttcacatttcaaaattagatttgctattttctaaggcccatgtctttccatcagcctttttggaatacagatactaacaagtctagaaactggcagttgtgccatatgttcttgtctaggtattatactagagatcactatttattcattatttagttcacttccagctggtcctacagatgaggggagttatgcaggtgagtacctgttatgtttgtaccatatatcagattctgaaacttaaaggaatagtttgtacctactttagtggagtccctgaaacctctttttttctagctgtaccttagctgtgttattatcagttacagttcaggattcatacctgtttgctcatttggcagctcccaggggtctcaaattgggttccctggagggtaggggcagacgatgatggatcctggttttttatttgaaatgttactttttctcaacctagcttctctcctcagggatacccctccaggacatgcaacccttggttgtctcctagtcgaggctgagggtacagccttgctctttcgaaagagcagtggcccttttaggctacataggtttatctcacttttgagtaatagattcatacctcaaatttttgtaaaagaagtgtcattttcatactgatttacactataacttttagaactcctttatcacttgactttgggtgagttacttaacctctctgggacttagttcttttatccattctttaatctataaaggggaatggcctttataaagctcctctcatcttaaaaacactcagtgcctatttctagtttaacatcttttggcagcagttccaaacacgtgagccttcagttgctgatcctgtccctggcaagtagttgctggattacaaataaatggaaggcagtgtgatgtgctagtgagaatgtgactgtggactcagacccaaaagggttggaatcttagcacctcagaacttagtagttatgaggccttaggtgagtaatttatttttctgtgtcttagccttttcctttgtgaaataagaacaacaatgcctgacccctgtattctgatgaggagtaaggaaaatgataataatatgtaaagcactttgtacacttgctagcacatagtaggtgttctataaatgatagatattattattccccatgaaattgtaagctccttgaaggcagggactctgtcttagtcatccttaaattactggtagtactagatatctaacaggcacttagtaatatcacccttttgaactgaaggaaagtcctttccaagttgaatctttataaagtaaatactttttatgtaaataatcaccctggagtttatctatttgataagtttggattgcacatattcttctgtcttaaagcagtacattgttataattgtattacctctctctctcgttttttcttttttgacaggtctcacttcatcacccaggctggagtgcggtggcacaatctcggctcactgcagcctcggccttcccgtgctcaggtgattcttctacctcagcctctcaagtagctgggactacaggtgcacactaccacgcccagctaatttttaaattttttgtagagacagggtgttgccatgttgaccaggctggtctcaaactcctggcctcaggtaatccattcgcctcaatctcccaaagtgctggaattacaggcctgagccactgaacctggccccttaaatttcttgttagtaactttcgggctacacggttctttgatttttttttttaaacaatgattgcatggtataatagtgatagtataacattattatggatttactatgtgctagtcattattccaggcaattcatacttactaatttctttaatattcagagccttctcattacctctattgtctatataagaaactgaggcacgagccagttaagtaactggcccacggtcctgagctgtaagtggggaagtagtggtctgtccccaagccgactgcttatcactgctatgttatattgcttagttcaactctagttttgagacactttactagacagaggttattgatgaaaacccagtcaaacccaaatcagcctgagtctagaatgaaagggaaggcatatacttcaggacaggttgacataaatctatttttagtcatttaaatacatttttgagaattgctttcccccttccaaatacgttctgagatcaggatgagcaaaagccaaacacatattttttatgttttgagattaaaactgtgtttgtcactatgttatagtcattagtcccctactgtgcttcacacatagcctctcctcacccctccacgtgcctgccccctgcaaatatgtcacagcaacaacaaactttagctttgtacatcccatcttccttacgtagaagctatggttgatttctccctctagtgttcctaatctgcttactgacctttgctatttaagctgacttttaaacatgaggaagagaggcgaattgattttctactagtaatgtgaaaaattagcgatttaatttcacaatatttgtaaataagaaaatgggaccaatggcctagtctcagattacattattgacttcccagaagttgtcctctagcccctacctctagtcgtgtggacatacagaacagagaactatggaacctgaatgaagtgtatgttcagatgccaacagatgattccatttctccctttagtttagtaacaacattattttcactgttcggaaaaagattggcttggtagacgtaaggaaccactttagtcagtgtggataaatgaaaaaacacaagtgatcagctttcatcatgacaaatggaaactgtcatttaatttttatccccaattatacagctccaggaccaatttttcaggtggaatgttggagccattaaaaagaaataagtaaactataccatattccatcatttttctggcagctaaccaatgatctgtagccttattacatgtacgtttttatagagatatttttctcttaagtttgcagaaggctttattaactctttactgatttcttctggaatgcatttttccaaatgaattccttttttctttttatcgctgagtgttggttgggatttactttggttttctctggaagctatactcattttcttcttttatgttttttttgattactagaattgcatggagccgtatttctttaattccaactgaagttatattagtggtcctaatgttgattacagactatgttaatttggatttcagaatgtgatttattagaaatataggacacacaaaaagacccgaccaaccaccttttgtctcctgccttaaagtgatactgaaaaagttgggtatccccaaaagtcgtgctcccatagcagtttgtccgttcttctaataggtcatgttgtaatttgccggacttcatcttcatgttccccagtaatttgaaatcttggtactgtggatacctttctatttggctgagttatctttgcatccacaaatttagcagactgcttggcacatactgggtatgcaaaaaatgtttttcgaatgactgattcaatgctttttaaaatttccttttgggactatttgtaattaaaaattatttaacaatattgaagtctagtctcttctgagaacactaaaaccctttacaattatgtgtgtagttttatttattccatatagaaaaattttacatgcagtgggtagcctttgaattttccaggtgggagaaattgagatcaaaggttactaatgatattaagaactccagagagaggcaatgctgtgattggaaccattgacttctgggttccaagcccttttttctccccaggctacacagctttgggtctttctgcttattgtacaatctgccattacttttattatcaaaaaatgtcactgatttatttttgatgtataattaacacagagagtggtggtgagaatgatggtcagaagatcggttgttttggttttggagaagctggttaatggatgaggtctattagctgtgtagatctatgtacagatttttttttctcccttggtgttcaaatcctttccccttcattcacctaattagtaattcacaggagcctttggctcccagcccaagaatatttgtatttactcgactttagcttcagaataaacttaattttcaatgaaagaggtactgaagtacattataaacaataaggcaacattttcttcagatgtatgccttggcatatgcttagaggagaaatgataccctcttgtatctacttataaaactgtcatctggtactgttgccattagaatatgcaagtaagcttataaacatactgatgaaaatggattcttttggctgggaaccttgttaagtaaaaggtgttaaatcatgtatcttgtcctcaggggtggtggactgaacagctgcgcttatccttattaatgactgtagtctcctgtttcagaagcagcaaatagccttttgtaagagttgttataatatcaagagttacttttagtcaagctctttactgggaatattaatatatagtctagcttggcaaacagcaaaaaaccctagcagtttgcaaatggttttcctagtttctttcccaggagtgataggaggagtaaactcaatgaaataaacacacgtaattgccgatctgtcataaatcattctttgtggtaggtatctacttttaaggctacattaggtcttccaatgggagaagagctctcggatttggctaatgtacctgcactgatggagagatgatgattttctgtctattcgcttgtgacataaatgagaacttctcttgtgtcattttgttgggggtggagtgttgggatttgggattggtcagtcatagaattgcagagttagaagggaccttagggattggactcagtatagtacaacatcccaaagctttagagtgagccctttcattttgggtagctgtaatattagaatgctttttcatatattatgattgtatttattattctctgtgatgttcactcattggtcccttgccttgcttcccagggtctaatccttgtttgtcaccatccatctagtgtgacatccttgactgtgcatgcccttgactcaacctggccctctctcccaccacttagcacatgccttttatctttctgtactttttatataccatattacatttccttggtgttcacttggctccatgctgaactgaattctgtgaaggtagggatcagatcgtaatgcatcatagaattttgggtgcctagtacaatgcccagtcctcaataatatacattattgaatgtgtattgttctcatcagcttaaaatagaactatcatgggttttttttgtttgtttttgcttgtttgtttttcctataggtatagctgttaggatgcctgattacacattgaccattgaacttaagatcagttgaaactctcagggctgtcaagagttgcctgatgcagggtttggggaattgtaaaataacggaaggggctagaggtgtcccagaacaacttctcattgatttcagagtccatatttctatctggatattagcctgtagcatccaagtgattggcgtgagtaagtcagtaccttgctcattttctataaagtttgatcatattcacaaatttaatagcatagtgataaatttctcacacaaaaattcctcaatgtatctttatttcatgatagaaaaccacctactgtttccaagcagtgagcttaatcttttcttcagtgtttttgcagttccacataggagttacagttatcattattaaatgtcttgggtagaggtgaaacagcattctggttttttgtttttgaaatctgtgtttgtcttatattcaatatctctgcaagctttacacattttgtatttgaatggttaaaacttcaaggctattgagtcatcattttcattggtgtgtcccatcatttctgtgagatacaacacaccccacccttttcatggaatgggagaagccctcagccagcatgtatatgatttctaagcctataggtacaagcatgagcaggcaggacttcactcctttggccctcgtcattagttttactttttttttttttcccagaagaaaaaacaccatgtccatattgctaaaatcagtgattgataaaatcttgaactaaacttgacataggtttctgtacttgaagaagaggtggtaggatcacctgaacccaggagtttgagaccagcctgggtgacataatgaggtcccgtctccacacactattaaaaaaattagttaggtgtggtgatgtgcacctgtggtcccagctacactggaggccaaggcgggaggattgcttgagccaaggaggttgaggctgcaatgactcacgttcatgccagtgtacgctagcgtgggcaatggagtgagaccctatcttaaaaaaataaaaataaaaatgaatgaaagccaaagcgactgagtatccacagttttctcagatactcagaaggaaaatgtcaagaacaaggataagttgggtgattattcaaatggtggcctgtgggtcctgttgaatctaatgcctccctctgtggattcagtggtgtttcctccaaactccccttagctgtctgtgtgtacttaatacatgaatgcttatatatgaggaggaacagttcttatctctgaagtagtaaagcatcttattgcatttgtttaatgactttgagatctatctggtaaactccaggttataatttctttctttgaatttgattgattttctcattcaaatatttccggaagtatttagtgaccatctatcatgtgctatgcacaatgctggagattgggaaataatggttcacaagacagataggatccctgttcaagagcttagcatcgagtgggaatacaggcaatgaaacaattacagtttatcacgtgtggtaagtaaggatagggaaagcctctgtcaggagatgaaatgtttgctgtttagcgtatccatacagtgattatgtattctgagccaaaattagagcacaaaagataatgccaaaaagatgattatgccaactaattttttgccaagaccatgtgtggatggaaattttaaagatacagtttggacattaaaatatatgaatttctgggacatttaagtaatttatgagtataaacgggtagaatatttgaaatcaagcctgccctggcaaatcctggataaatgtttgctgtactttctggtttctgccacttgtagagctgaatttatggagctgttaattcagggaacagattttaaaaagaaatttattagcatataataaaagcataacagaatttattaaaagtctgatttactttagaaattctgagccctactccaatgttttgatgggaaaaaataaaccaggaaaaatgagcaattgttcatgttctcagtgcagatattattaaaagaccttctgtgctactggagtgttatggattctctctctcaaaacaccacttggctgtgctttgtcactaaagtcgacctgacaatttcccgtagataactctgaaatggatgtacattcatgactttgcataataatttatgccttcaatattgctgtggtcagcatgtggacatctctgcaaaacattagttaagtaattggtccttttcagctgcagtctgtcaacagcacacgtcctttgaggccatgagaaaatacttgcaatgcttcagtgtactcatctatgcaaattggtgattcatgggccaacaagggcaggatagaggaactaggaggcaaagatgtttgaagtaataaaacagttgctaaaacagggtgggatagctagtatacctcctccctgcagtcaagactatacccaaaccatctgagatggacacctatctaggctcttcttgaaatgccatgacatgaaacgtttaggaacaggaatttcttctgtatgtccataatattatctttgcctccacttacccttttacattttgggccagttttctctttggtggtaatggatacctggttagcctttacttatgacatcattttactaaaagccctttgctggaagtaggtctgggggctcagatcgcatgtttcaaaagtctttttggtttgggtgaagttttgtagctgctgtgcgtggcaggtagaagacccagtgcacccctcccagagtgggttctctgatgataatgcttcacctttaagattgcttgacaggatttaaccacatatgcaacaaatcaatgcagtctagagaacagatgcacttgatctatattgtttgtcttttttttgactgatgcaggcaaaagaaaccatcagatagcttctcggttaatatagctttgttctgaaaaggaggcagtgatatatttgaggatgcatatggccaaggcctgaaatgaggtggatacttaccagttgggacaacatataatcaatatccaactaaagcattctataaatggacctttttttttgatcaaaccatattatgtaaaagttctctaacagtttattagtatcattagaaaatgtagcctactaaaaattctaaatgatcattttaatgaaagctgtgtcatttgtgagtggcacttgcctataaatttttctagagctatgaaaataagttagacaagaggccaatggtttttctttcttctatttttttttacatttcccaaagctctgtgaacagctctgactgtctgatttgtttcatcgttgccttccactgcctgtagaacatctgttggaaaataatgcttgtcctgtcagtttccagaatcagcagcaaaccgaagtgtgcgcacaaggtagatgtcagcattatactgctgctgccaccaggctactgaaagacagaattaatcctgggctggtaagattcattaaaaataaaaaaagatctggaaaccctattcaggaatagaatgcttatcccaaaatggaccaagcagaacacaagcaaagtggtgattttgaactaaaggcacagatataggatgattattgcctgttatttagtggatgactctttgttctgagactaggttatactgttttgctggaagctcacaacagatcaatagtaattttgttatgggccagatgtcaaaacagaaatgtgctttcaaatcccactgacttgctgtgacaactagtatgctaaaatacattcgctcagcaatcaggcgttacacggtgctcctggagttctgttttctttcatgtggagccttaaagctacgtattgttagctgagtttccctgattttgtagttctttctctattacatatgtacctcttttggttgagaatagaaacacttcctcaaattctcccctttcctctgccttgataatgagctgggtgtaaagtctacaccataacttcctgttacaagtatcatttttatggtaataaataaaatctgtggtaggaaaatggtcacgaagaaaagcaaaccagcaagaagcatgttatttttttagttcctctgtagtccaactttggaattttaattttggtctggtgaagatttgggagtcaaatgttttgtgatgaaagataatttaagggatgttgatttgcccatcgctttggtatcttcccgtttctcctgcttctgtgaaactgttggttacctaatgtcttttggatgagattaggatagcatgccatagtgagaaaatgtcttcctgcgctgatttgtttttgtagaaatatcccaaattaatcagagggaaacaactggcagtttttggctgatgtggtttggaagtgtaattttaaatggtgttagtttcttaagtccagagagaattggactcatgtcttgtctatctaggcccagctgtcttccccgttttctccttaaaacaggaaaagaaaaagcctttccttttcagaccaagaaaggattgaacaagctcagaattatgtattcaataatgtgataagagttttttattccacctctggggcaggtcttgcatttcttaccattaccctatcttttgtagtagaaatatctctaagtgagaagaaacatttcatccaagcatgtaagttctcttagaacttattactctgctggattttgtgtatattagtctatataattcttgatgctgctcagatttctctaacagacgttttactcacttacaaaaagaattccttggattctgttgttctttcctatctgtattgccaatgcttttcacagaactttgttcactttactcttgtcagcttcatcagtaaaatgaacagagttcaaatcagattaagtaccttctgtagcagctttcatttatttactgaccactggaagatgccttttttcaacaaaaattaaatacactattgctgcattccagactatgttacaagtggaagaggattgcagattagtatgtcaaagccccaccctttcagaaacttatacacatagaaggcacagctctcataccataccattgaggtacaacagaggatgaatttgcatgtgtctgccctcattctcttagttgattctcctgatagctaagtgcataaattgccaaatcatgggagagagaagctaacctgtccactgagaattaagtggacagagtaaaccacatattttgttgtaattgttattacctcagctgtattttcgtacaaaagaatcacagttcatgacaagggaacgtggaacatagagcagagagtcaggaagagaatgccaggtgggtccccccaaaacaaaatccagtaaattaggagggggagttgaatatgagaattgcaattattatctgagagcaaagcagcaaagaaactcaagaaggtgaattgtgttttcaggaacacttttggaaaaacctctagatttttcttaaataaaaataaaatcttacataaaaatctataaaagataccagaattagaaaaaaatggagaacttgggatccttttgcttctttacattctatgttggacataaagtgagcattactttatgtggggaatatgtatgtatgtgtgtatttatatattctaatttattttaacagggtgaagtgggtcagtgagtaagatgcaatagaacagtagttatctttgtcaattaaagcccctgtcaccatggcgtaggttagtgtaagctctcttgcagagtgtctttgtagagatactcaagtaataccatgtgtagttttgcagagattttgtaggtttcttagatgtttaccgtcgtgtgctaagctttttccaagccaaaaaacattgatctaggccagatactggcaaactttttcttcaaagggccagatagtaaatattttaggtcttgtaggccatataatctccagcaaaatcactcaggtcggttgttgtaatgcaaaaacagccataggaaatacataaaagcttggctctgttccagtacaacttattttattttatttattttttgagacggagtctcactctatggcccaggctagagtgcagtggtgcacttggctcactgcaacctccacctcccaggttcaaacgcttcttctgcctcagcctcctgagtagctgggactataggcaccagctgtcacgcccagctaatttttgtatttttagtagagagggggtttcaccatgttggtcaggctggtctcgaactcctgacctcaagtgatctgcctgcctcggcctcccaaagtgctgggattacaggagtgagccaccacgcccagccccaatacaacttttattatggacactgaaaatttgaatttaatataatttttatgtgtcatgaaatattattcttttgattttgatcaagcattaaaaaatgtgaaaaccattcctagcttttgggctggctttgacctgtaggccatagtttgccaaccccagttccagaccctttactgtctatgctttctaagccatattgttgcttaattggaagctttaccatatcataattaaatttggtagtaactgtgtgagaaagtgaaacatttacaataatcctaagagggccaggcacagtggctcacgtctgtaatcacatcactttggggggccgaggtgggcggatcacctgaggtcaggagttcaagaccagcttggccaacatggagaaaccctgtctctactaaaaatactaaaattagctgggcatggtggtacacgcctgtaatcccagctactctggaggctaaggcaggagaatcgcttgaacccaggaagcggaagttgtgttgagccaagattgcaccattgcgctctagcctgggtgacagagtgagactctgtctcaaaaaaaaaaaaaaaaaataataataataataaaataaaatacttagagaactgatacaattgtcagaattcaactctccaggaaaactcctacagagagtatagttcattccattttatttggggctgcggtacgaattctcagtggcctgaagagtggcaagggggagaggtgaaaaccagccacaggaagggctgatggtgaccaagtccttgctgaatgcctactacaccctgacgctggggtaagggctgtacccagattatctcccttagtcctcacaagatttctatgaagtgagaactgttctcatctctgttttataaaagaaaccagtcctggtgggttaagaaacttgttgaagatagcataataaatggcagagactagatttcaacccagtctgtctgacgctgtgaggtgtgtagtcagcgtcgggcaatgtaagtcagttggctgattaactgcacttagcttggtgccttgcatatggtaggtcctatatatgtattactgttttgtctgtagcaaaaggggagggttggggtgaagtagtattaaagcattagggaccaaagagtatgataccttcgttagagtttcagttggatcttgtaatcaacctgtgtcttaatcaagccagaatatgcttttgggaaccaaagaggagtgataaaaaaataaaagatcagagaaactcatgcagttaaaaatgtggcaagtcatagacatggggaagccagtgtgaaagtccttactactgagctcatgaagctcatgaacttccacttgacggccagagtgtcatgtttcagaagactagaggaaatttttttgacttactgccaatcatttacataaacttaaaagatcttagcattaaaattacttatttgaagtgctggcaggttaataaattcagggggctatttgaaacattgtcaatctaaaatgtaatcctattaaaataattgagtattttctgagtggagaattcccttgtcctcctgtccaaggctcacaagagaacaacataaaaggcatcctaaaatgtcctctgaacatcattgaaccagccgacgtgtttgcacagtgtaatgctctttcgcaaagaatttcctcagctcttccactttaaaaggcagaaatcccaacataatggcaagtttattctaatatgggaagtggggattatatttgaagtgataccttatataggtcctgggaaccttcttggtctgtttgtgctcatttctgtatgtgattgaggatcctgtgtaactcaaaacatgtgcgtttgcttccttctgttcctttcttgggctccttttcatccagcagcttgggttaccttgaattaaattggtttatggcatgccgttttcggtaaaactccctgaaagaaatggtcacataactcaaaaaggtttgcccttggagtgatttagtcatgctggatgatagctaaggaggcttattgactttgagctccctttggaaccaaattcagaaagctgtgcacttctgtggcacctgtgagacactcacttgaatagagctactgagaaaagcatttcagttattggcatttttcctaatgcattttgtatgtgtctataccacagggagaaatgtgtggttattgttgaaatattatctgcatggctttgtagaagaagaagaagaaaagtcactgtacagcaatcagcagaggaagtctcatagtgtgtgtgtgatgtttgggtgggggggtggtctgtgtcttcccccaccaccaaaactccaaacagctgtgtggctgtattttaagactttgtgacttacacatctattaaagggatcttgaacttgacaagttggatgttggtaaccatgatttggaatgctatttaaatacgagcattccttttgttcacctggttgtgactaggaagataggccttgatcatttgagtaactgtgctctgtgaatccgagaggaaaacaaactctcagaagtgcataaaagttaagttaatttctttttctttgtaagccgatagactcttgtttaaatacaaatttgtgtggacagattttcgtttgtcatgcgtgagctgggtatgttgcatttgtctaaagggagcagttttaagtaggtggatgtgtaatacccgtaggctatcagaaccaccatttcaataaatcccttctcatataacaaccgtgcaggaagtttgggtaattgattctcctgagcaatacaaatattgaaattcttaattattccaagtgatgggcagagctactacttttatattttaaaaaattctgtttattattcttaggtgttcattaaacacttattgatcagcagtctacagccaggctgtaggctagatgctgagatgccaagtgggcaaaagggagaatccttgacctcatagaacactaaggaatgctgatcccacatggataattataatgcataagttcattaattcaagagatttttgtttatttagtatgtgctagatgctgggcattggggagggaaagacttgtgggatggggagaaagggacaatggtgagcgaaagcagacttggccctcatgctccttatggtcagggatcagttattaaatatatttagggccgggtgtggtggctcacgcctgtaatcccagcactttgggaggcctaggcaggcagatcatgaggtcaggagatcgagaccatcctggccaacatggtgaaaccccatctctactaaaaatacaaaaattagccaggtgtggtggcgtgcacctgtagtcccagctactagggaggctgaggtgggagaatcacttaaactcaggaggggcagaggttgcagtgagctgagatcgcgccactgccctcctgtctggtgacagagcatgaatctgtctcaaaatatggtattatatatattatatatatggttttatatatatatatggtataatatttattaaccaaacagtcacacaaatatacaattgtaaatgatacaagtgtcatggaggagaagcccatggtacaatgaaatcatgcaccaaaagcatttgatctgatcaggtaggccagggagggcttcgtggaggaagtgaagattgagctgagatatgaagggctggtgtgaccaggttgaaaaagacaggaagaactttccagagggaacagggtgccttaaaggaattgaaagaaagccattagctggagtcagagatctgggcagagaggagagaagaggtaggaaggttcagactgcttaaagcccttcaggttgtgtgaaggactgggggccttgttctaagagttataagaagcctttgagggtctgaagcaattcatgaggggtaacatgaccctagatgttttctggaaaaaaatcactgtggttaccttgtagaggggcttgagtggctgcagacaggtacaaagaactactgtctggacaagaggtaacagtggcttgtattagggtggtggtgggtttgagcgtaggcatggagaggtaggtggaattgaaaagtgttatttaggaggttaaatctacaagcttggtgatgggctgggtatgggccgttaagaagaagataaggataatatagttatgaggccatataaatgacataccgacattaaataacacgaaataatccttattttgcgtcttcaaagttaaactttgcatatattttacagtagttgtcaatctattttccagtttttctggtactttttttgtgccatttaggaaggacattgtagttcttacccttttttctccttttaatgtaattaaggtggtgaaagtactcagttgcaactctaataagaagtgcaaaaagaagcagttccaagccagaagataatatcaaactaaaatatttccagcaatatcagcaaaatgtaaagacaatatcggaaacaaacatttgctgcctcctaccttctctgtcgattttaattcagaaaatttaagtgatttttctcatatcgaaaatgagttaaaatactagagagtcttttattccttataaactaagtcagagtaatttattttatctggaggagagtattaaattagctgtcaaccgtgctatacaggtggatggtaactattgaatgaaatgaccaaatctctggtcctgcggcattcatttttaatctctgctttccattgaaaaaggcaaaacatgaaatattgagataatagtactaaaactccaagtaattgcttttgttagctcaactcatgtttactcatattaattactgaaatttgataacccctttgttttttacttagcctgattctgaatgcagtggacagagctataaatcaggtaggtggttctcactaaggcaggactcttttgctttgatgttggcagcttaaggctaattctccaagcttgataggtttataattcaagaagatgtgatttaatgttgatggaatttatttttgaaacacattataggaagaaaacctttcaaagtaacaaatgaagttttgaggtaaatcttaaataaataaagattgtcaggatctctaaacgcccagcgttagctatctctataggatagttcctccacctttagctggagggaaatggctggaggagaatgagaaagtgaagagacaagatgtggaagctatagagccttatgaataagtcatgcatttaaagacattacttttttgtatcttctcctctttctaaatttacttgacattaccttcttttcataatgtttcatttgcggggttccttacaagttatttttccaaaggttaccctatttggtatgattttttttttgacatttaatttgcactataggattgtagaatgtggagaaatcctgggttcatttctttttccagtttgctgatacataaatttcatcccccctcacgccctcatcttatttgtaacactcatcctttcaagaggagtacatgccagacactgctccgggtctgggggatgtaagcagggaacaaaccacactgagttttctcatggacatccctgctttggacactactattactaggaccacctaaaatcacattatctacttctaattttttattattttttgtaacctcatggcattgttagctcagtagagctcaacaaacttagtgcatactgtttgaagaaaattattctaaaatataatacacaattctctgcctttgaaaaacaatgtttgatttcaatgttacttaaataaatgacttcggcttctatttttttttttttttctgctcttgtgcccaggctggagcgcaatggcacgatctcaactcaacctctgcttcccagactcaagcaattctcctgcctcagcctcctgagtagttgggattacaggtgcccaccgccacgcccagataattttttgtatttttgtagtagagatggggtttcactgtgttgttcagactcgtctcgagctcaggtgatccccacccgcctcagcctgccaaagtgctgggattacaggcatgagccaccgcgcccagccaggatcttttagaataataatatatgttgcatatagactgttatatgggtttgttgttttgttcattctgcattcagagagtgctattttttttagttctcagcaatttttaataaatcatttttttctgtttctttgctctctgctttttccctttttaaaaatttattttgattttattgtagtttggaaatcaaggtaaccaagattattagaagtgtgtgaaaagtatgttaatagagtaaatggtgacagctcgtcatcctttcccatgacttcagtagcacttacatggaaccaagacatttgagtgacttagatactcccttgtaggttctctggcactctggagagttgggcttgccacgtactgggcctcaaacgtgagatgttactgaaactatcttgtccaaaatattttcctgtgaaatcctttgaggcagtaacctttttattgcaacatagtacgatgttttataattttatcctttctggatttcctagtctgctcatatgcgcacacacgtacacacacacacacacgcacacacacactgctagttttttttctctatagctaagctttattgagtgaaacctttaaaatgatatctctacattctgtcagtggtatattaagaattataacaaggcaagaaatagtgaaaataagaattgaggagcttatagacaattgcaaggcttctagactggatgctaggttacatgaacacacaacatattgatttggggaataagagctatatatagtttagatgcaagctatgacagatgggggttcatgagcaacaaatctgatgacttctaggcatcattccaaactcttaaaaaaaaattcaccagatgcaaggactcttgcctttcttaatgaattcttttttatataaatgagtcccatttatatatttcctcccatggccaattatcctgagggcattataagaattatgattttattattatttttccatttagtggatgtattgccacatggtagtagggtagttacattggtaaagttgacttttttctaaaggaacccataaatatctagatagcaacccagaaatgtctagatattttaaacctatataagattacaatctaatgatacgttttttcataaatatttgtacctttgtctttgcaatgcttttcaaaattatctcttttggaggaggtagaacaggttcatctaatagccctttgccaacatttggaagactcagacatattttctttagttgtggacatcccctttaattacattcttttttttttttttttttttttttgagatggagtcttgctctgtcgcccaggctggagtgcagtggcatgatcttgattcactgcaagctccgcctcatgggcttaaggattctcttaccttagcctctggagcagctgggactgcaggcgtgtgccaccacgcctggctaagtttttgtatttttagtagagatgggctttcacgtgttagccaggatggtctttatttcctgaccttgtgatccacccacctaggcctcccaaagtgctgggattacaggcgtgagccaccgtgcctggccctttaattacattgtacttcattattaatatattttctttttctttaatttctgtttgtcgattaatacatgaatatattcccctttacaaaatgttttagataatgctaaagtctccactgatgaccccttatccatgttagctaacttctgtattcttctatgtttgcccccatatctatcatcttatctgtcatctatcatctatccatctatctatcatctctacttctagatagaggcataaacgtaaaatccatagaaaccctatgggacagcatacgtagtatcattctgtcctcatcattctacacctgctgtcttcagccagcagtgtcctagaagcctggccatgttgctacgtgctgattttgcttgttccatttaaatgctgccttgttttttcttcagcacacatatacctctgtttgtttagctgttccccaattgatagacatatgggttgtttgaagatttttcctcatgtaaactgttcttcagtgaagattcttctgcgtgtctccatgtgcacatgtgtgagagtttctttaggatacacacccagaaatggcattgctgggccatagagggtgcacattgtaaattttaatttatatctgctatgcttggctgctggtcattttaaactttgtttcgggaactaggtttttgctttttttaatgaacagagttgaaccaagtaatgttctcctatggaacaaaactaaagatcgtttcattatatcctcctgtattcctgtggcattcctatctgcacctttcatggagttttagaacagattaagtgaaatttgttaatatacatgccaggaaacacagcaacctgtccctggctcttgtcttacccatcacatgcctcttcctgcttcatcttagttcatccctgtgaatggcagagacccagtcctgtcattttaacggaaattatccaaattttaaaaagaaccaaaatgagctaaaccatccaagctgtggaggggcccagagggggtaaagggggaagcaggggagggtgggtgaagaagagagtattatggatgaaactcaactggtgcagcagaggatgcagtgagtgaccttgtcttagcggaaagagagtaaagggtgattctccagccacaggtgtttctgcgctaagtacacctacaagaggatctggaggcaaaatcctttgaactcttgcttctcagagcacaggggtaaaaataaaaggggaaaggctttctttacaggctaagacttagttaaggccagtggtcaagctacagtgtgcaccccacttcccctaccctctgaagagatggggcagccctactctgggtgacatggaagcgactgaaatcaaaagtctctgtgaaaaaggggccgggggtcagagtctggtcctgtgtcttgttactactactaattgtaattagtttcttcaattttatatcatctgtgagagagatcattttaacccactggcaagaggtgatataacatttttctagcatccactaatcatgtaggataaaacattcctgaagctcaaaagaaaattcgtgtttgggagatgcctggtgctgctgctaagatttattttctttttaaaatgtcagtgtctgctgcctttcctgcaggtagccctcctgcctccttgtcacctgagtccttcagtgtcttaggtcgggctgcatctgttcccgcagagcgttcccttcctccagcagaaagctggtttgtttggctgacagatggggttcccgctttggcctagatgcgcctagttaaagggtttctgtttgaagcccgcaggtgaaggccaactccacacagacccctgcttacaaagttcccttcatggtcacgtaaagcagtaaggaagtttttaattgacattgtctactgttaagagggcatagtgtggacatcttttgagagggtttactttgtctttctatgaagtgtcaagctattaattcattggataatgcagtgggtttggaagagaggtacatattattgtggcttatcttttagaaactccgcacatcaaaatcccctcagaagcaacaatcccacaaacctatgttgcaatctaacccaaagcttaaactgtttgagtgataggtgtagttaaaataacagtatttaatgcccaaagcacattaaatttgggtgaagaggatgcattctgcataatgcctagagatgtctcgttacgatgcggttacctagcaacaagtggaaactgtatgaaaatgaggtgcttatctgttgttgaagtgggtgcaatgaaacttattacgctagcctgtttggcttggcatgttattaaaatcacagctaatgtggaaagaactggagcctgttctcatttgatacagaagcactgttaaatgctgctactgtaaaatggcaatactttggttaggaaaatagaaactcgcagcctccttaagcactcaacattgagatgttagagtttgatttatattatcaaagacttattaataaaagagcagacagaatctgtagtggtgacttaagaagcagccagttatttagatttttaaaaacattcagggagccatttatcgtttcatctataataatagcttagtacggccctgtttcttgtagccaaattgtctttatctgctgagcttattgaattctaaccacagtcttcttaagtttgtttaatttacagaatcggggtgcattgtcatgatctttaaaggttctctttttgtctagtcacattaaaacaatctgcacatattttatactatatactgatgcatattttgatgggaatagaaaatcttcttatccttactggatcatgggttttgttgttgttgttgtttgtatatatagaaaagtgtgttttctggctgggcgtggtagctcatgcctgaaatcccagcactttgggaggccgaggtgggcagatcatttgaggtcaggagttcaaaacaagcctggccaacatgtcgaaaccccctctctacaaaaatgcaaaaattagctgggcatggtggtgcacatctgtaatctcagatacttgggaggctgaggctggagaattgttgaacttgggaggcagaggttgcagtgaacagagatctcgccactgcactccagcctgggagacagtgcgagactccatctcaaaaaaacccaaaaaacaaaacaacaaaaaaagaaaagtgtgttttcctacaggtttgtcttactacttctttatgtatagtatatgtagcttcatatggaagtctaacttcactacattaaaaacaacaaggtcaaactgagaattctaccaaaatatcctctgtgggtggcctgtgatcctaacatgatatagcacctgttatcctagagatgaagaaaagttcaagtactttctgtgcttgtcagagacctgtgatgacacacagaaatctggcatacaggacccgactctgttagctgtattctgacgttacttctggggctttggaatgtgtttatgtgtagcagatggagctattagttagctgtgctatcttgaagaattgctttcccaggtaatcagctctgctcatttaggatgtcgtttccccacctcgatatgtcagctcaagaagcaggaatgattaattgctgcaactggacagtgcactagaataaggggaaccatcccctggtactcccattcaacagggagtttgaagtgctatgaggcagagcaaacaagatggaaacgatgaccaggatgcttcctgaagcttacctgtcagtatatagagttgctgtggcaacctgaagatttgcaattcataggaagagtagagcgagacaaaaccttaagtcatggctgtcattacagtggaatgggtgccaccaacacctggcaacctctattacttcaacttgtttcttttcacgcttggagaaataaaatgcataaaagattaatatgcatagtaaaccttttggtaaaacatgtatgtgttctgcatttcagatgagtaaaaacttcaagagttcccctctacttaaatcaatattacctaataaggttcaaagtgaggttaccatcagactcttgataaaataagaactatgatgcaaggataaagaaagcatattctctttcaaatttaaaaaaggtggggggatagataacagtgtatttttaaaattgttgcccctcctggaaatgcttataatgtattaatgtaaattatgtgccctctttgcagctttctctgtcaccatgcatagtaaggagaaagttagttctgggttttgttaggtctaaatggttcttttccatttcttcttgttaagtaacgggtgttttaagtttctcctggggcaagtacaatccatagagatgaatgttaaaagcacttagttgaggattatctttctggaggggggaaactcaaataacaaaattactgtggtttgtaaatacggtcacatcatgtatgcatgttctgtgattttgtcacttaatggaaatgtaggatttccagcatcaaactaacattacaattgtcctcttcaggtgttcactcgaatgttgaaggttgatgggtatgtaaatcaaaactcatttaaattttatccagttggcactaaggcctcgacttttgtctttgctctattaaaaatgcacaaacattaaaaaaaaaaacagaccgtagcgttttctaggtttatattttactgtgttcagtaactttcttttcattttttgttgtaggagaaagtgttttccaagtatatattttaaaaacagttaaactgaacttcgcttggggttttctgacaaacagaatcttgaaaatcttccgtttctgagtgtcagaaaaatgtacagtttcaataaaatcatagcagtcagtttcctgacaggtgcatcaagtctagaattaaatcgaaaggactgatgtgttaaaaacacattaaatatttaatgttaaagatcagcttatagtttttctcttatgttttcaaagggcacagcgaactatctgtgctgttccaaagagttgcacttgtaaaagggtctattcaatttagaccaggatccagaaatgtaggttatggctaagaggatgagataacaaatagatgtgttcagcttctacaactgacttggtagtttagtggccatgttgtccctgttgagatgggaaagctttctgattggtatgttacagctcaccgctgcatcaggcatttcttcaaaccagcatagtgttgtaattggagatcatcttcttgaagatggagccttttatttttgtggctttctggggagttgtaatgcctgcctgtttttccttttaatcagatgtttgagagctgcagcttcgggtcaaacgaacatattcacacctgatttttacagtattttttcagcaacttgagtattatgtttaaatggaaaactatcctgaatagtccccttttaggaaatagtctgtctgagagcggcattttccagcatttggtggatttgagagaaggcactgacacctgtaatttgtaacccagttaaactcgtttatcttgcctggacacacctgtggacaagaagcaagctgctgattttaagttcagctgcgtaattttacttgtttgctcagatgtcctttaatttattttctggggacctgatgacagtagcaagattttaaagttaattgctagattcaaggacaagtcccatgaatgggctggaagcatacccttagggcataagcctgtgtgcggatctgtgacaaagccctaattttgagtttatgtaatcatcgtaccgaaatatttaagatgggaatctatcaagtcttatctgttgagacgtgatcccttttatatctggcaggcctcatgcaacaaatttcctttcttttaagtgatctccaaagctgtcaagttcatttgagtgaactgtgcttgagagaaacatgtacaattttctctggcaatggcatgctgctgatgacatatttttagaattagctttttctctcccccacccttctagaaactgaacttttatttaagctccctgctgttaacattggaaagaaagtttcctgtgccaatgtttgcccaaatggaagaaaatgtttgcattttgtatgcagtgttcataaacttgatgagtctaacagtttggcaccgctggtgagcgcgtctgctttgagttctgaagggcaggcagaaatagtgtagtgaagcactgcagctactgtgaaaaggtgtggctgagctgctgtgttgagatgcgacaggtcgagaattcagaattcatttttcctagtgctttgaaggtcagtagttaagagagacatctcccacttgtcaagtagttgtaagcaaaagaatcatttcttccctcattcatttggttaaggttagctgaaacactggcttgctttgatttctctgggcaagattgttttagcaaggccgtttgactctctgtttctgtgcttttggttttagtttcaaagatcttgccaaactttgccagggcgcattctggtcttcaaaccctttgttctgaaagctggtgccaccaaattgaataatgtgcaacatgttatagacccactgtagaaaataattgcagtttgttttaacattaagttaaattttttctgtatgcaatgcaaaggtcaaggaaaaaggcattaaaaaacatccctgcacaagtgagtcatttgcatagaaaatgctccactggatgatagagtatgaaagcagtagggaattaactggtaagtgtatggcaaatgacctagccaaggatccaagcaagaatgatttgttccaagaaccagtgtaagacgatttaggaagatgcacttttctttggccctcatcctacagcagcattgaatcaggagaacgaaacagccttggctttgttcatcatcagtaagccaagaagatcacggcatgggtcattaagatttacagctcaaatgtaaataattcaggacccacaaacaataattaaaaaaccaactgcggcactgcatgtagtcaggtcctctgggcctctttgagtaggaacctctcctgttttggctggagacctgtccatctgggtacagatggttgtaagagctttttaatgaccttttctaatgctggtgaatgtgtctttggacaccatcgtaaccaatggatgaggagggtggaaacagcaggatggtggcagctgaggaattaaatgtcctgaatttgttagacatctgcagaaacatgcaatttgttgggcagaaaattgtaaacaaaacagactgagtcaattatcaatacacctgtgacaccccgggatgccagctttggctgacagcttttaaccagctgaggagcaggaggaagttcacaatgatcaggagcaagtcaattccaagttttctgctataacttgtccccttgcttgtgtggtgatctcctgtgtggacacgtctttccttgttacactatacacattgttctaaattctaagtcattggttcttaaccagtggtatgtttcagaggagcttaaggagaaaaggagcttaagaaatatgcctgcttctaggggcttttgcctggagagtctaattcagtagttgtgggaccctgggcatgtgcatattttaaaaagcaccccaggtatacacacctggttgagaaataatctcacatgtgtctcaagttaacaatggaggagagcatgaggttctggaccaggtcatgagaaggctcgaactgaatttattgatcaagaaatcaactcattatgcagataaacattcagagcttgggcacagtcaagatgaaagtggctaaggacaaaaatgtgtcccgttgattaatttctgtagaaaggccactgactttgggtttggacatcagccacttcctgattttagcatctgttcccaactctggattttcccatttaaggtccattctgtcatcgtgttcacccagtttaactaatcagattattgagtctcaggggctcattttcgggttcacggtcaaagatttcttaatactttagagaattcagttaatttcctactttaaaagacaagatggggtattggctttatgaacctgaaaacagagctttcaccaactgggagacttttgcaaactggaaatatctgataattgtaatttgtaataattgttaaatgtagtttgaacttaaagactcaaaaggattatgtctctttatggtgtgtttcttaaaggcaggggaggggcatcaaaagggtcacaaacaaactttttggatttttaaagaatcttctactgggattgaagaagaggggaaaaggaagaaatgttttctaaagttacttgtgtacttcagagtatgatggattgaacactgttgtgagaagggaatgtggagaggtgacccaaacaaaggggcagtctattagaagcaaatggttagaagttattaggaactagagaaaagcaaaaactgtgtaattgtgaacagcataaagatgggttgaaagaggaaggaaattctaagtataaaaacttctaagtggtctttctgggaagtagcatatgcttctgtagcagagcatagcaaaattagagacccattttagtttttgtgaatacatttacattttctccccttattgatcatcacctgtcttcaaaaaaaccttcagtgtgcattcatttatgggacccaattaacagttcagattccttttcctttcttctgtaatatttgtattctaaattatgattcaatgggctcttgaatcttttatctttagtagactatgatgttatatagtttatgtaaatatttgtcttgacgtgctttaagtacttgctcttgtaaagtctcacatttgcattgttttattgcagtcattctgtgtaaattaaaccctaatctcttcaattctattgtcaaggcctcactcttggcttgggtgtaatggagataggatttggttggtcctttaatgtggtatatttaatttaatttttcaggtagtgacaaacattggggtttgggctataggctctttgacattaatatgtataaactctgacctcaaatatggaacagtttaaagtgttacactgaatgcaatttgcagcacgaattttttttaaatatataatgtgaaatagtatttctggtccagattctgctgtagagcttagctgaagcaaacccccaatggcttatgctttcctgaggctaatagaatttttttggaagcctgtaagggtagtagtttgatatttatctctcagttctcatgtactataggatttttctaaatatagccatcttgactgtaaataggttacatgaagcagtagactagtagactggccgttcttgttaagtgtaataatcttaaccacttgcgtgttccactccccttataccctcgggctatactattaaagaagtttcattttctttttcggattatcaaaatatatagagcataaccattgagccacaagtgacttttgcattccaggatgggcaaggcaaatgttctctctcttactgtaagatcacactttgttgaagaaagacatcttttaatgtgcaaaaggtaaaagaggaaggagagcaaaatttttcttcacgtcaagttgaattattttgttattcattaacattgcttcttatccgcatctgaattagatgttatatagtcagacccaaaccataatgtgaggtaatcagatccacactataatataataaggataaatgcatcttcactacaggtgtcgtttgctttagggtgacttgtatgttaaaatttgaattaaatctatcaggcatgatctgcagtagcccccgcttgcccatggtttcacttttgttggtttcagttacccatggcaaacatgatccaaaaagattaaatagaaaattccagaaataaacaatttataaattttaaatggctcgctgttctgaggagcataatgaaatctcaagccatcccactctgtcccactgggttgtgaatcatccccttgtccagcatctccacaccgtgtacgccacctgcctggtggtctctcactagccgtcttggttatgaagttgactgtgaggtatttcagtgcttatgctcaagtcaccttcattttacttattctgttttatgattggttattgttgtcagtctcttattgtgcctcatttgtaagttaagctttatcttaggtatgatgtataggaaaagacgtaggatatatggagtttggtatatccggagtttcaggcatccactgggggtcttggaagttatccactgaggataaggaggactacttagttaggtactttagcatagtcatgaattagtttgtaaagattcaccacaagtttcccgtaaacggtgagctcccttagtcatgtaatgcatgattcaattaaaaatgttttgatttgcatttaactttgcaggaattgactgtcaaggtgatataacagtttaatgagctactgtgggaaattgtgtagtccccagccagacagttttcaagtgagttgaaatctattttcccttggatggttaaagaaaggtatatattggcccacatttcttcctaaatgtctcctcctctcctgtgtttcttaaacacacctatacttccatattgaattatcataaaatctctgtttacatttaataaatattcatctcaaaagcccctcaacttactgaaaatgcttttactgtattggtttagagactgttccctctttttaatctctactgtcaattaaattcagtgccctgtggctgattcgattcagtctaaacaataattatatcaatagtttgaaaaagtcaaaatattatttagagcattttctaattttccttttttactagctggtcatgtcttgttgcatgcctgagtttttacactgtgagtacaatatctatctgtgtgtgtgtgtgtgtgtgtgtgtgtgtgtgtgtgtatttaatccttacaactgaccagcatgaagggggtttgaggctacagtcttggatggtaaactcaacaagttagtactgtgactgtatgctgagtctgaaaataagccatctaggtttgtgtaggacagaatactaggataccaggatgccagatgaatttaaatagtgtagtgtgctttatctgtgcttgttctgtctgtgctgcttaaatactgataaggagagtctacaagaatactagatgtgatttgtgctacttgagtttactgttacccagcagatttattcattccatgtttacaatctgaacagttcacttcatatcagggtttagtgattctgatgggctaaaatagaaatatattgtttcatatttttttcactctggagatttaatataagaaagcagcggacaattggccaaagatactcagctttgaatatgattcctgcttttcacaaaaatatgtctttgattatcttttcataaatgcatgacctggagctaaaattttctgtcagtgtcttctgtggagttgtatattaatggtttgacttggcattatcagcggaagagctatgccactacagtatttaaactgcatgccagacatggcagctggtacagtagataataatgaattgaagttttcacaagccttgtggtgttttcttaccattgtttgttttcggttttccttttgtatgaacacaaaaggagtaggatgcaccaactacagtgaggcagatataaggtctttctaccctaagatcaccttggccttttctttcatgcagcttcttccaggaaggctactttgattatcccacttagaatcaaagtctttttttttttttttttttttttttttggagacagtctcactctgttgcctgagctggagtgcagtggagcaatctcagctctgcctcccaggttcaagtgattctcctgcctcagccccttgagtagctggaactacaggtgcacatcaccatgtctggctaaatgttgtatttttaatagagactgggttttgcatgttggccaggctggtctcgaactcctgacctcaggtgatccacgtgccttggcctcccaaagtgctgggattacagatgtgagccactgggcctgtccagaatcagtctttttaaaaattttaatcgttccttgtctttataactgttctgtcatattccttatttgccttgcatatgtcttctcttaacttttgaaaacttgtaactcaagcagactctttaaaacatctctttttttaggttttagctaccagccataggatctaacaggtgcaacaaataatcagtatataatatatgaatgatgaccacttggtgaaattaactgtcagtttatagagaaagggtgatgaatttaagaatagccaacatttggttagccatttatagattagaaattgctctcatatgtgttacttcgtttgctctcatgtgttatctcataatagtactatgaggtagggaatagttcactttccaggtatgaaaactgtcagaggttaagagattttcccaaagtcactgcaaccactccatattttaactgggatttgaaaccaatttttcaagctcaaaactcttccctcattagaccactctgctagaagatatatatgctagttcttcctcatccaagtctaaagtcgtagatccttttaaaatgctgatcctccttattaggggataattgatgcctagaaaaggtcacctaagtgaatctacttaaatcaggcactggaatttcacagtaaatagagaaaaagagatttgcttgaacttcattgtggaagtgaaactaataatgaggaataccattttatatttaacaacatttaaactataattgcatctatgtgccaattcttagaatgagcaaagaatgaagtgttgattgttttccagggcaatttttctgacaaagttggatgacaaaatgccacagtgtccttccctttattgtaagtgtttagcctgaatttattcttgtgacttttctgttctagtggttctttggtctaactttactagaaactctttggctcatgatttggcttgttattcaagctgtcttatcatcactttcattgattttaccaaattctgttcctttgatgagatttacaaatttattatttattatttttttttaagagttgcacttctatattgcagtctgttttctttgtatatgtggtatagaatcgtccagagacctacaaagaatataactctgtggacagagatagactgttgtgttaatttgggtggggattaattttttaagtggtttctgtgttacttttatgatgactttggccttctaactatgggggcttaaatgatgaatattaagataactagggctccctgaattagtaaaaatatcatattgatgttctttacatagttgaagtgttgggtgttttttttctactccgcaattatctactttcatgaaaataaaagtccattgggctaaatataattgatgtaacaaaaaataagcaaatggttctagaagagggcttcattttaaggcagcatttgccttagttaacagattaacaattgtatgctttgtgtgtgtgtgtatatacttatttaagcagtatttgcataaggaattattccttatgagtgtgatatcatgagactgatggtggaaatcagcttgagattaattttagcataatggttaagaactgaactggagccgggtgtggtggctcacacctgtaatcccagcactttgggagtccgaggcgggtggatcatgaagccaggagtttgaggccagcctggccaacatggtgaaaccccatttctactaaaaatacaaaaattagctgggcatggtggcgtgtgcctgtaatcccagctactccacaggctgaggcaggagaatcacttaaaccctggaagcagaggttgcagtgagccaagattgcaccactgcattccagcctgggcgacagagcaagactctgtctcagagaaaaaaaaaaaaaagaactgagctggagccacactccctgggattttgtcctgtcttcaccctttactacctgtgtgatcatgtttcaagtcttgtaatctctccatgctagaattttcttgtgttgataatggagacagttatcatatcttcctcatagagttctttcaagattttaatgtacaaagtgtctagaacagtgccagacacatagtaagcactcaataaatgttaggagttattgtgatttgatttttgtttaagaattattatgaatattataggggttttgcagaagaaggaaatgtgaagaaaactgctttaagttggcatgagaatgttaagtcttctgttgttgttgtcaacgaagtaataatctcagaaatatttgttgaaggaaaaacctaagtttgctgttgaatgatatataaaaaactaataatatttttgagcaaatatgtttaggtcttctaaccatttaagtgtattaaatgcttcttatgcacaccctctcttccctcctgtgtctctttattcccagccccactcctgtgggtaaataaaccagatatttctttaggtttttacgaagaaacctgaaagtaaataatttaatggctgaatgaaatggtacttttaaatgtcttttctcatgtgtaaatacagtgaaattgcagtgagaatttatctttcagttgattacttgcttcaggttttaggagtgatggtgacagatgaacagtaattgaggtgtgaataaaattttggaaaagataaatgatatcatttcttgtggaaaatattgcattcttccattatggtgcgtggctgtttattagctatctttagtggggaaagacccttgatgcttgtaaaacacctgtagttttaaattggcttaggatagattaatggtaaatgattagagacctcactggattgacaaccacattgcatttgtaactccagtgaggtagtcggcacaaaagtggcacagccctcctgtggattattatctctcagggaaagagagaagtacagtcttactgctaaaatttgtcttatactaagttccttattttagaattggttggaagattgcattgttttccttcatatagacaagcaattttgaatcatttttaaaaagcagattcaggggctgtgcacagtggctcacgcctgtaatcccaacacttcaggaggctgagagtttcacttgagcccgagtaccaggctagtcaaggctagcctgggcaacatagcaagatcctatctctaaaaaaattttaaaaaattagctgggcatggtggtgcttgcctctagtcccagctacttgggaggttgaggtggaaggatcacctgagaccagggaggtagaggttgcagtgagccatgattgtgccactgcactccaacctgggcaacagagtgaaattctgttctcaaaagcagattcaaaataattttttaaaatacttaaatttgcttcataaagctgtttataaaagcagattcaggattcattttttaattgcttaagttcgcattataaagctgtttctatgctttctcacatcaacttagttttgagaataaaaagcatatattgctaagagtgaactagcatattttcaagctttatgtgtaaaaaaaaatcttgaagtctgttattagtggttttgtaaaaatttctgtttttagtcttgtcaagaggtgcttcataaaaaccaggcaattagaatgaagggaatttcagtcttaagttatttgagttcaaagcctttcctgtgttttaatttactttgtatttgtttttatcaaactctggtcctatttggagaaataaaaccactgacttagggagttccagcttaccagtgagggtatttgaaattagaggccccaaatcgttgataactgagattgtgccattgcactccaacctgggcaacaagagcgaaactccatctcaaaaaaataaataataaaaaaaaataaaatagaatttccactttctttggccacaaagaattgtacttttttcttagttgtttattttaggggtgaaattcagtcagagactctacagggtccctactgggtaggccttcttttgctgtttagatttcatgtggcagattgtagtaaggctctcctaattcttaacatatttccagtttttattaagtttaaaaatttaagcctttcctatcattccataactaaatatagtaatgaaattttatctgaagtcaggaacattatccaaatctgatttgatgtgtgtagggtactgcacattcattgagtggtacagattgtgttaaatgggcctgaaataatgttcaggaaagagaatcactttctgttcttcttgacacaaacagtttgtcacagacatgcattcatctccctatcttgttagtgtagtcgttatatttttcattacaagttttatgcaaatcctctagttttccttgattaggtttacatgaatacattgtaattatagactgggtgttattaatatatgtgattaaacatgtaattaatatgtgtaattacatagagtcatggcagagctgggctctatgctgatttattgtataggtgctgcttacacaaagacacagttaggattttatgctgaatattttctcacactgtaaatctacggtggtttgtcaccagggtatatatgctttttcatttaagaatcctttttatggtcatggcagcaaatggattatgattgttttttactgtggctatatcaaatactccacccagagaacccatagaagaaaagtttgtcatggttctgtgtatgcgagcaacactgctgtatgccagccacaccctggaatgcacagattttactcatttgtttgtttgtttattaaatgtgttaagctccatgttaaactcatctgttaaataacctttttctcttctgtctcttatgtgtttggttactttccttcttagctaaatttccctttttttaaacatcgaagagcacctttctgctttttttgccgtcatctgtatgtcatgttcttgtccatctcatcatttcacattttttaaagctctgtaaacagacataatgcaccctctgcttccttttcagcatttattctgttgctcttccccccaccctcccattctgcctctagactttgtttctttttcttagagaggaattctaaattaaacaatgcaagaaaatgaaaatggcaagggtacaacattatagaggactaaaggggaatagaagtaagttacgttattgaaatctcagtgtgagggaataatgaggataacacaggttaattttccgatgtgtcctttacccacataattgtccaggacatagatgttatcggagagaagctaagaagcacaatttgtaagagtcttaaaagggtaatagaagacacacttaggcttagcatcgttaatgggcagagaggttcaggtcatagttgatttgagtctgctcaaaacattgtgcagcatgttgtattcagtgttctggttaggatgttggggatggcccaagggcccaataactaacagtgtataattttgatttgagtgcttaagtagatatgttttcctgaaaaaacatgagcagtaaaggttgacttggatttgtatgcggcatgtttccaagggggacctgggaacagatgtgttgtctgttctgaaagcattgggatgcatccatgttttgcgtacagacccccttctgtctggtgcactctgccctctaaaagcttcctgaattgctttgtaaacaaggcagctactacagctgcaactgttgggtttggacttttgccagcttgaaatttatccctgccctaatgctatatatctgggagcaggcagtggaatttttttttttttttcttcaagcttatggaagcatttgctgaggaagatcgtcttgagggtcaaggaacccagattccttaaaactgcatgcattctccgtggattattttgaccaccaggtcagatttcagcacctttcctgaacttttctccagttacttagttgggttactgcttcattaaaaacccataattcctatgtcttttatcttggtgggccacttggattcaagaggactagattcagccccttgagtgaatgaatgaagattgtttctcaacattcctttctttggtatgctaatatttaacaatgaaagaaaagaaagacaaaacaaaacaaaaaaaacgaaaaataagggataaagtgaagaacgggaattcttaagaaatctcctttgaggattagcgctacctggcagttgctaaagtgactctgtgctgcatggattttacattgtctttgtgtgttatgtagagaggtgttgtgatgtcttctttgagtgcctgaaatgccagtgttcttgtagaaattggagttgtgctttattatattcttgacttgttgatgaattttccatttaagcctctttcttctttcttatctggcttttgaagtctcctgcacaggtggattcctttatgccttctcactagatcaggattttaaaaatgttcattgttcatctcttcatatacgttatagctgcctgggctccctttttgacctccttgggctgatgatgtgtgacatgtgacactgtgcaactagagttggtatttgccaatctgtatgcttttggtttatttcatattaccggattaaaacgaaaatctatttcattccagtagcagcagaaagcacaaaatcttgaggttcctgccaatattctctttttggaacactatcaaaaatgtaacttttctgttggaataagtatttttctggccaacatctccccctctgcccctggcttctgtgtgatgaaataacattggcttcttttagctcaagatttggactatttaggagccctttcacataagaaatggatgtcttaactaattttcttggagtagagttgattatgaataagtactaggaggaggggctatgtagaacctttgtaatgtaatatggcatagtaaaagcaggactaaatgagatttctcaggattgggatgggggcatatccttcctatgtcatgtgattttaggtcagtaaccaacacagttgggaacttctccacagcttttggccgctccacatctttgaagagtgctggcctgcatagtgggatagaaatccaggccttcattgatttattccttttggtttcagtcccagatcttgaactgtgcagggatttaaactgatcagggacagccaactagctgtagtataaagaaatgagctgttgtgcttgggggaaaaattgtttgaagaactaaaaatgacacatttcctttaggcagaggaaagttaatacattggagtgttactattttttaagggggacgtcattccattctcatttccagtgttcacatgtaaaaataagaaagagtggggcttttgtttaagctgttgccaataccaacatttaccacctcctttagagtttttttttaaaacggctctgtttgactgaaaatttgcttagggctgaaacttgaaacttgtcatttagtttctgagcctacaggcaaattactaccaccccccaacacccagcccttttagagcaagaagactttttaggaatttgataattaaggagcttttttggcatttaaaattgcttacctttcttcaatacacaaaaactcaactcaactctgcctttttttttttttttttttttttttttttttaaatgacagggtcttactttccttctgtcacccaagctggagtgcgatggtatggctcactgcagcctcgaacccccccaggctcaggtgaccctccttccttggcttcccaagttgctaggaccaaacggcacacaccaccatacctagctaatttttaaattatctgtagagacagggtctcactatgttgcccaggcaatcttcctgcctctgcctcccaaagtgttgggattacaggcatgagccaccgttcctggccaactctgcctttacatgatagctcatcctttcgaagttaaatttgaaataaaagtggtcctcttggctggatttttgaaaccttcctaatgtggaatatcagattgttgggtgcatatctaggcattttggcagcacttaatgaaaacaaatgctccagcctttctataccaagatgctgctggcccacacaccatacctgtgctttggttctttctccttatggtgatggtagatttgcattgaactcatccagcggttcagcttcaaagaccaaaagccaaggttagggaaccatagaactaaattattttgccttgtgaaattaatatttcagagaaatggattcattgttaacattatcaaccaatagcacccgcagtcttggaaaagttcagcgaagaggtgaatggggtcttttttagccttcgcccaaacctctgtagcatgtctatggctagagtatgttgatctttcaggtagtgaatcattacagttaatcctggtgaaattcagcagcaatcacacttaatactttagtgtgatatgggaaagtgcctctcttgtacatacacccgacactagatgattacattttaccatgcttcaactgtgggggcattttatgactatatatcactttttttcttttttttttttttaagacagagtttcactcttgttgcccaggctggagtgcaatggcataatctcggctcactgcaacctccacctcccaggttcaagtgattctcctgcctcagcctcctgaagtagctgggattacaggcacccaccaccatgcccagctaatttttttgtatgtttagttgagatggggtttcaccatgttggccagggtggccttgaactcctgacctcaggtgatccacctgcctcggcctccgaaagtgctgggattagaggcgtgagccacagcgcctggccatatcacttcttaacatacaaattgcttagtaatatataacctaatatttattctttataaatattttattatttattataataaggtatataatattatgtaattatataagtattacattatataattataatgtataaatataatatataatatttataaatattttgtaatgcagatgccttttaaaagtgtatatttcacatgtatttattctttaaatttattatggaaatgggattttgttagtttaatcttcagtaaaggcatcttaaatgatctggattttttttaattgttttgttttaaaaatcaaacctctttaaaacatcttaacatcttttatatattctggggtctagcatactccagagggatttggttaaaatttttctgaatagaaatccttaaggaagcgagtgaatatatgaataatgagggaggaagtatttggatatttttaaggaaacaaaaaggcagccctaattttagcatatggggtctaaagataccatttacatttttataccaatataaagtcaaggagaaaagaaatatccccatgagaaaactgaaaaaaccaaagttaagcaaaagctaattgaagaatcatttaagagtaaaggcctacattttatgatgcagatgccttttgaagttgtatatttcacatatatagaaaagcttatagaaccacgcctagctttgtcacatcttaacactatgccgtgtttggacgtcctctctcgtgtctgccccctccctcaccttactccttatccttcctcctaggattgaactataatcctgaatttactgtttatcaatcccatgtccatttcagtcatcttcctacgaacatgtttgtctgtagggtgtagtatttttgcatgttttagataaaatattaaacataatgatataaatgctgttatgctgttgtattctgaaatttgctttttaccttcatactcattggtgagattcatcttgatgcctgtggctctggtacacttattttcactgctatatatattttatgttttgtgaatatcgctgtttatttatttattctcctgttgatggactcttgcttgtttgcagtagactgttacatccagtgaaaggatgaccattcttatatgtgtctttctgtgtgccttctacttttgaatgtgggtaggaatttctctagggtaacacctggaagtggagttgctttggacatctttggctttcttggataaagctctcccacgtgattgtgctcatggctggtagcataggtgctgtgggagaactctcatagcttcgtatcttcttcaattccagtactggtattgccagaaaataaaattttcattgatttgatggtagtgaaaacataccttcttgttttaatctgcatttctgctggacacactggcttgcacctgtaatcccagctacttaggaagccgaggtaggaagttggcttgaggccaggagtttgagaccagcatgggcaacagcaagaccccgtctttaaaaaaataaaaataaattagccaggattgcatgcctgtagtccaagctacttgagagactgaggtgagaggattgcttgagcctaggagtttgagaccaacctgggcaacatagtgagacactgactctttaacaacaacaaaaatctgcatttcactgacttgtaaggttgagaatcatttcacatttattggcctgttgagttttctcttctctcagtttcctaatgccgaatcctttgctgtttttctattggattattttgttttgtcttttttttttttttttttttcctgaggcagggtcttgttctgttgcccaggctggagtgtctcactgcagtcttgacctcgggggctcaagtgatccccgcaactcagcctcccaaataactgagaccacaggcgtgcaccacagtgcctggccttcttgataatgtggaaatgtggaaattctttatgttctgaatactaatccttgcgggttatatgcaattaagtatatggcttgtttttttttatttttatttatgttattttttgttttataaaacttttatattaattttaatgcaggcaaactcaatcttttcctttatggttttgctttttgcttatttaaaaagcctttcctacttctgaggtcataaaaggtactttctctccctttctctttttttcttctaaaagtttgcgttttacttttgttaacctatctggaatttttgtgtatgatatgcaaatgggccatatatatatatatatatatatatatatatatatatatatattttttttttttttttttttccgagacagattcttgctctgtcgcccaggctggagtggagtggcatgatcttggctcactgcaacctccacctcctgggttcaagcaattctcctgcctcagcctcccaagtatctgggagtacaagtgtgcatcaccacacccagctaatttttgtatttttcatagagacagggttttaccatgttggccaggctggtctcgaacatctgacctcaagtgatctgcccgcctcagcctcccagggtgttgggattacaggcgtgagcaactgtgcccagcctaattttattttttttctatgaggatatctggttgtttccatgctgctttgaaaaacacacataaaaaaatactttttttttttctaaaaactgactttggtttttgaaattttaaaaccaatttgaactttaaaaaactaatttcaggccgggcacaatgtctcatgtctgtaatcccagcactatgggaggctgtggagggcagatcacttgaggtcaggagttcgagaccagcctggccaacatggtgaaaccctgtctctactaaaaatacaaaaattagccaggtatgatggcacacacctgtagtcctagctacttgggaggctgaggcaggagaactgcttgaacccaggaggtggaggttgcagtaagccgagatagcgccactgaactccagcctgtatgacagagggagactccgtctcaagaaaaacaaaaaaaattaaaaacaaaaaaattaactattttcagacttaccaaaaaaaaaattgcaaaaacaatgccaaaaattcccatagacgtttcatctagattctccaaatgttaacatcttacataaccactgtagaaccatcaagtcagaaagtttgcagtggttcagtactattatctaatctccagactttattcaaattttcttagttgttctcactaacaaccttttgctgctccaggattcgattcaggattacacattgcattgactagtgatgtctctttaatctgtgactgtttttcagtccacctttgtcttttatgaccttccttgatagttttgaagagtactggccagatattttgaagaatgtccctcagtttggatttttttgatattttctcatggttgaatttgttatgcatttgtttgcaagaatgtgatttgtgtcctcagtgtaacgtatgaggaagtctataatacccatttatcctgttattggcaacgttaacttcaatcatttggctaaggtggtgtctgccacgtttctccacagtgaagttactgtttttctctttgtaattttagcatgcattctttcctatggtgtttgctaaatgatttctattcccatcatcctttccacatttgttagttgcagttctatcagtaccatttattgaagagtccatcatttctctagtgagttatgtttacctctgtactgatttataaatctacttctacatctctgctagcacctaactcccttcatttagagttttatacccttttgccttctcaccagtaacatacaaaggtgctatttcccctcagcctcataaacggagtatgtagtcaaacttggagttttgccaatctgatcagtgaaaaaaaaaatgttatgtctcttattatgaataaagttgagcatcagttcacatgttttgagccatttttgcttattcttctgtatactccctgtttatgtcctttgcctatttttctgtgggaatgctggtatttttcttttagatttcttagaagcttttttgttttgttttgttttgttttgtttttgagacagagtctcactctatcgcccaggctggagggcagtggcatgatcttggctcactgcaacctccgcctcccgggttcaagctattcttctgcctcagcctcctgagtagctgcgactacaggcacgcaccaccacacccagctaatttttgtatttgtagtagagacagggtttcaccatattggctaggctggtctcgacctccagacctcatgatctgtccaccttagcctcccaaagtgctggtattacaggtgtgagccaccgtacctggaccttaggagctttttatatgttaggcattataattcccttgtctgtgataggttgcgaacattgtttttccaagtatatcatttgtcttttggctgatggcattttgttttattttgctatgcacaagggtttttataaaatacatttttatgtacacaaagttattttttattatttctggatctgccttttctctaactttataacagacttcaagttttctttcaaaagttatgtgggtttttttttgtgggggtgttgggctttttcttaaaaaagacttaattttttgtagcagttttaaattcacagcaaaattaaaaagaaggtacagagatttccttgtccccatacatgcatagccttccctgttgtcaacatcctctaccagcgtggtacatttgttgcagttgatgaacctacactgacacaccgttatcacccaaagtccatggtttacatcagggttcactcttggtgttgtccattctgtcggtttcaacaaaggtataatgacacatattcatcattatacagtattttccctgccttaaacatcatctgccttctgccagttcattccttcttcccttatatccctggcaacccctgatctttttgttgttgttgttgctgagatggagtcttgctctgtcacctaggctggagtacagtggcacaatctcggctcgctgcaacctccgcctcccgggttcaagcgattcttctgcctcagcctcctgtgtagctgggactacaggcgtgcgccaccatgcctggctaaattgttgtgtttttagtagaaatggggtttcaccatgttggccaggctggtctgaaactcctgacctcgtgatccacccgcctcggcctcccaaagtgctgggattacaggcgtgggccaccgcgcctggccaacccctgatctttttactgtctctgtagttttgtcttttccaggatgttatatagctggaatcatgcagtatggttgctttttcagtttggcttcttcatttattaatatgaatttaaggttcctttatgtcttttcatggcttgatagctcattgctttttaacgctgaatactattctattgtctgtgtataccacagtttgtttattgattcacctagtgaaggacattttggttgcctacaagttttggcaattacgaatgaagctgtcataaacatctgcgtgcgggtttttgtgtggacataagttttcaactcttgggtaaataccaaggagcattattgctgaattgtatggtaagagtatgtttatttttttaagaaactgccaaactgtcttcaaaagtggctgtactattttgccttcctgccagcagtaactgagcattcctactgctccacaccctccccagcatttggtgttattggtgttctggattttggccattctaataggcatacagtgatacatcattgttgtttaatttgcatttccctgatgaaatctgatgtggagcatctttttacatgcttatatatatcaccagcaaataagcatatatatatatatatatatacacacacacacacacacacacatatatatgatacatatatataaaagatatatattatatatataaaagatatatatatatattatatatatatatatatcaccaccatatatatatgtaggtctgattttgacagtattctgatatataatgtgaagtatgaatgcaatttaatttttttccattggctgtccagttgtccaaatatcatttattaaaaaggccatcttttcccacattgatttgagatgtgacgtctcatcatataccaattttctatgtatacttttttcactttctgagctttttgttttattctattctgtttcttcacgcagcaaaaccacactctttcacttgtagaagctgtataatattttgaaatatctggttgtgcctgcctcttccctatcctgatgtagaacacagacacacacgtacactgtttttcttttttaggttttcttggtaattatttggtctgtttgtttttaatttgtttaagtttttatagccaacagacctagttggcatctaagtagctagcatttctttgctatttctagagactttctttgccacctagtatcgaccaattctttgttgatatgtcatttattctgaaaaagaatgagcattttatataggctgggtgcagaattttgtatgtacatcacacatttctggaaatttaaagtttttgtgggcttctaaagcaaattatgcagcatgtgtaagattcagggatatcctacagcctgctctcatgtcatgttcatcatataggtcagtgggtagaccgcaggtggactgtgaactggctaacgctatgtgaaagaggtttctatatgtgatttttctggagagaagatacatgaattttaaagatgttttatcatcacaaaaagttagactgttccaggtaaaggtgagaaaaaagactggaatttaaatactctgttaaaaaaagaatgaggatggctttgaaaaattgaaagatgaaaaaaaacagctctttttatactatggtgctcaggatacattgactataaaattaaagtgtgttttaatatattagtaggtaaagtttctgagaggtgaatgtctacatttacaataatggtgttttctctcatatttcttttaggtaagtgacaatcttatgcttggatacatcagcttcaaaatggatggattttgagggtttcattcctcttctctgatgctgtagcagtaagtcatacttctcatgtgtgctctgttctggtctggtctgggccaggggattggcttgacaaaagaaactagataatttcttgtaaacactttgcttcttttacttgatatacgtgttttgttaagaactctttgtatgtgtagtctctgagattgcacagaagaataaaaggaccagcttccaactttcaagaagactggattttcgtaaggatacaacagaaagaacttgggttttggagttgtattaggtttgaatttcactttttcattactgtgtgataactcagttggatatctttttcttcttctatttcctcatttactcaataggtgtaataataactacgtatcagattgttgggaagattaaatcagggaatatctatccttatcacagtgctccaatatatagattttgttgctcatttcttctttccagctctatcccatggctcagaaagaaacaacaatgtctagaacatataaaaatagagactaactctccctcctgttatctgaagggtctttggctgagattcaggaaatcttggagaccaggcaccaaaggattttgtaaaggaatctgtagtgggtctaagtaggcactttttaaagcatcagccatcttcttgaatgtcatagtcacattaaaagagcctagttaaatgtggcttagatattgtttcacaagtggccttagtggaatccctgtaaataaatatgttagaatattaggttgggaaaatattgttttgtttaatctaaaatggaatttaaacaaatgactaaagaatgtaagctgagattgtttgatctcatgtgattctttaaataattgtcacattgttgtgtttagaattatctagctatctggcctagtaaacagatgagcaatattcactgagaggggaagtatatacaatttggtttggaacgtggaagagaaccatgcttaagttggagagacacaagtcagaaaagtcagggggagattcaggcatggccattttagttcatatggctcaaatacctctaatccagtggcataaggcctgacaagaaatgttcctctctaaggagatgctggggccaagggagactacagttcattgcacattcagagattaaaatatctccaaattagttccagtgaatcattttaaattattttaaaagccttttatattttaatcagagcctattcacgaccagttaatttggatggcacgttctaaaattactttcccccaatgatgtgttgtgccactgccattgaatgcagaaacctcacggaagaggggattaaggaaatttgaaagtaccaaggagctgttgatcttagtcaagtgtttactggtttatgagtagattaagatttcgttcttgtcatctgatttggatgggaaaatgagtaatgatactcttgtagagagggtgagtgattccataggatgccaaaagtatggcgatgtgcccatttccccaaatattcagggaagacttgatgctgtggcattgctgcagtactttcttcaatatttggatgtagtctctgggtttagggaggtattgttttaaccatctttgctagtctcaaaatttttatccaccattttgttaatctgttctacaattagcaaaggggtgcatgccttgttaagagttctaactgtatggtacacttccttagtcattaacgtaaacatgatagagtacaatgtctcttattgtcacttgagaataaaaaaatgagctatacagatcatgtgttggttcaagtttgacttttatgctctgttattctcacttcaaagatgatgagactgaaactcaaagaaagaagacctgccttgggttacatatcagtttagtgatggaactctaggccagcgcttttactgatagtgatcttcactctctgctcctctttgactggggaggagccttgtgcttagctgtactattctacatcttgatacatagacttttcattttgtgggagagtagcagcaagtccttggaagctgttcattttgcagttagctaaggtagaggggctggtaatgttcagtttttctgtaccattctcctgatatgttggctcaagataccagaatctatcttggaatgttgtgtattacccattagttaccaatcttctgctggggaagaatataaataggagaaaaaagagatggacaggatgaatttttaaattatagcactgagtaacaactgctagtcaagaagtttttggcagtttgttagaatctcattttaaagcaataacacactcagagttgtattcaaacactgagataaatgcatcaacctaaattcatggttttgtttttttccatgtagctgctaattattgaacataacgaggcttattcataatttcttttctcctgcttgatagccataatcctgtatttatgctgctgtcattcccatggtaacagactaatgtctgaagcataagattattaaatacagcacagtacattaaaataatgctaaggttttgacttacagagagactttcacactggggcaaacttcaaaaaaaaaaaagagaacgcttatacagaaagcaatttacttggccagtaatgtttagtattcccatagctattatggcagagatttgtttgaattatagcctcttccttcccagcccatcatctcctttggctttgcagccaagtcttaatctggtgtttatgatgtcagcctgttgccatgggagttattctgtcacagatgtattgtgacttcactgcaggacagaagcagtggaaaatttaggatgaaatagaacaactctaaagttaatctccagcatatctgttttggaaaagaagtattcccttcacctttatgtgctcctaaaaataaataaataaataaagttagttaagtggtgacttgttgaaggttggccaacgaatattgttgaaatgaccaaaatgccaaaaagccagcactaaggaaaaaatgttatgtagctcaaccctggctctctgaagagtggtcaagatttatgtttttaatcctatgctacagtaatgaagcacaaccatgtctgtagcacataaattgatacaccattttttctggttttcttgtaaaggactttcttctatcttaaatctaatgtggtcacattcacaaggacacgcgccctttgcttccaccgccaatgacaaccacatctttattattcacagacatatgtggaggccctgccaaactgagaggcatctttgaagtcaaattttgtagtgctcatagcacgttagcattatggtccctcaggggccccttcatcatctggtatctgggacagtctcccatttggatggcataaaaataatctaggttctttcctagggatgagagatttctacagagttaagctaagtacacaggtgatcctgtgtgcatgatgaactctttgaatgtcatgaaccaatggtacaaatggaatgcatgtaccttaaatcatttctttaaaaaagaaatacgggacagaaggagaataaaatgctatgtagcaactaaaatcttttggactatgtttaaataatatgtaaaattaggaaattagctacagtgagtcttttttaaaaaaagttggaattacagggtttaggatttttttcttgccctcttcttccatgtttgaacttaatagagagttttaatatccttccccttattaaaataaaccattaaagtaggcaaggttaagcaagttcacatttcaaacatctctgattgctggcgatttgtcactagaaagctgtggtagtcaccttggaatctgcatacctttttttgtgtttatgagaataatctgtcttctgctctctcacccaaatccttcttaaaggactggggctctgctgtagaaactcatgtcagcataatatgccatgtacctctataatgattttttttcagcattttgttgagccagcttcagaaacagcagtgagtatgtgtgtaaatgatttgctttaaaaagcagatgtagattaatgcattggtttagtaattttttcccaactctttccttttccctttatctttttctcccccttcagttctctgggataatcccaatgagaaatctgaaagaaggtagaagaatttgtttgttttctgtactttacgtcaatgattcccaaacttggagagcatcaagaaatcctgaatgcctgctgtcacccccaaagattgtgatctaattgtttgggggtgtggtttgggctttggcatttaaaaaatatctttaagtgattctaatatacagacaagtttgctttctgctttctatatatgaatagctgaaaattgaactatcaaaggcaagtctaaatatcacacgtgtatttgatttttataaatctgttgtgccccttcctactttatgccaagtctcatttcctctgtataagaacatgctataaaagtaatcaatctctgacccacgaatttttccctttcttttggaatgaataatggatgaacattaattatctctagcgttttgttttgtttttttattttctactttttaaaaaaattggcttcaaaattttaggaaattttgcatcaagactataaaacaaagtcatgtggctcgtagggaaatcaacagagctcctgtttcagaaacttgattagcactggaaattgaactttagtttttgacattgggttccacactatgcaccatctctgtagtgtgctcagtctgcatgcagattgttttccttaagctctttataaataagatgacattaaaagaatagtttaatcatgttttcgtttttcaatatgtaacgctagagaagacgagaagtagatttcttcatctcataaaacaaactacctttgcaataaagttctgactaaaacttaacccggcattttttttttcatttatcttggttattgcttttcacatgtctcgtggttcttgtaaacatgattttccctctggagctagatagaaagctaaagtcataaaggaaagtgttggtatccaagcatcttgcttctgatgtttagccttaagaaatatatttgagcttaaaagaaaagtaataggtttgcttgaattttcttacttttccttcacattctcttttactgcatctatggatagctctaatacttgctttagatagagatctgatgtaattttataaagcagtgctgtaagatgactgcaaaggatgttaatatttctgttgacactgccttgtagatttccaatgagcatgtgcagatgttaagtctgtagatctagatctgtaagcacaaccattgtctttgttctaaatgtttgaatttgttttagatagtcaaaatgattactctacctgtacatactatgaaaaagggcttccctaagagcttgggtagttttttcttctgaccatccagaaaggttttttgttttctttttttttcttcaataaattcagccttttcatagcagatgatttattaccgtggtcggtgactctgtatttggctgatttattgaaaagtccatttattatcagtaactttagtttatattcatggtaaggacagtgctaatgccataatgctttgtattttctcatttttttcaggtttgttcctctttcatagctatgtggattaggaactaaaactgaaaagatcccttgtcaaatttcagattgaattttaagatacaaattttaatgagataattttggaatgaatggaccctataaggttattcagagctgtggatttttttttaataggggaataagaatgcattctgtttttaaaaaatgctacctctatgttttttttttttcagatactgttaacatttgctcttttttctaatactttatttactaagacttcattcttctgtttgattaatgacaaccccgaaaagtatattttatcccaacttttctattaagtctttctttccttcagtcttctgtgaaatctgtttcatttaaaatttttttctaattctaaaggtagaatatctttatgttgataaaaaagataatccataaaagtatagtttagaggataaaattcagctataatcctaccactcagagaaaaatattcttgatattaatatttttcaccttccatgcatattaccatgcctagttcagattagactcttcttgtttttatttatttaatattgtattatttgcagtcttctgtctttgtaaatattcttcaagcatatgttttaaagactatataataattaattttgtggatgtatcataattgaatgggctatttctccttttttttttttttttttttttttggaagagatggggtctcgctatgttgcccaggctggtttgcagtggctattcacaggtgcaagcatggcatactacagccctgagctcctggcccaagagatcctccctgggcccaggagcctcagccttctgagcacatgcgaactacaggtgcacaactactgtgcctggcttgtttcaccacttttaatcctctagatttttccagaattttgctattgtaaatactgctttcatgaatatctttgtatttgatctttgcctctattatatagtgtttctttgcaggtttcacaattgaaattcctgggtcagataatggttgtcttgatttccttcctcctggctggaaatgaccatctcaccacatggtcatttgtgtttgggaatgcgaatgttagtttttaaagtatctgataattatgcagaggaaaaatataattttgctttaatttgtgtttatttgctgtcagcgaggttgttttcctccaaaagtttattaaccatttggttttcttttcagtagggttttaggttctttaacccatttctgaatcaatgtttaatgtgtacgtatatgtgtgtctgtgtggtgtttaatcaatgtaaataggctttttagagtagaggtaataagcctttatatgtcctattataactctttagaaattctctgcctaatttttgccttttctgcttgaataggaaaagctttaagaaatcattgaacttaatgaatgattcatttatttaacagacacttattgagtatctattacgtgccaggcactggagtaaatagacaaatatctccccctgcatagaacatatatttgagtggggagtaagaaataaacaattaacacaataaatgaacaaattgtatagtattttaagaatgacagcaactatggaaaaaaataagcaaggtaagaaggactaggagtactagggaaaggattacaattttaaatgggatggttaggactggctgtaatgagaatatgacatgtgaacagaaacgacttgttgtttttcttgtatagaaatatttgttctttgtggtgatattgttagtgtgggcctgatattttgtttttttaataacacagatttaattctgtgctctgtgggtgatctcctttttaggatagctaaaatgaatcaccttggtccagagccctgctgtacactgttgaaggggtctgtaagttgatcttcctgtctgcatgcatgggcgggaactctgcctttaatcaggctccaccagctgtagcaccagagcactgagtttgtggcctttgtatgtcagaatgtgcatagctgtaagagaagttttgtcagtgtgaatctgagggtggagtgagatttcttcaccacctggtgagaaataatctgtcttgcagtaagtgctagtgttgttttgttttggggaaaaaggaaaaaacatttttcatgatgcaggtgttgaaatttctggattcctctctccctcccgcatcctcctcctcttctcttttgccttttcctccttctccttttatttctacttctttttcttgcttaattttagaatttgattctgttgctggatgttatttattctctggcataaccattgcagttcgtttttggagctgtgctccacggccattcacattttagaatggaactgtgttgttttgtcattcatcactcaagtctgaaagaccattgtaatcgttttgctgataaagaacatgaatgtaaagaagaaatagtggtaaaccagacagccctgagagtgtgttgtcttgaaaaggaacatgagatcacagagaagttctttatttttgttcatttaaattgatgaattctttaaattgtatgtctaattgtactcattttttttatagtttaatgcagacaggttataagattctagacgctaattcacactgatttctttcacaagttaggagacaattgttgattcataaaacatgagaggaactttgggtaattgtcgattgcatgactattctgtgcatttctattgctttgctatcggcagtcattaaatggattcaatttgaaatctgaatgagaaattagtgtattcttatgaatgtgcctcacataagttttaaatgaagtgtttgactttttcatacatatcaacttggcaaaagaattttaattattttattggctgagtttatgagattcatagttcaagattactcaaaccagggtacatttagaaataaatacaattaaatgctcacaaatgtgaaggtcttaaacaggaactgagctgtaataattgtttaatctagaaacttcctcttttgttttgctatacactattctcttaatactcccaccctcccccaacctttttttttttttttttaagagtagcctaaccttttgctggtgactccgggaacctattagaaaatgaatggtggtgctgtttcagttttcctttcagcctttcagttaactaaacacttacatctgatcattgtcacttagtttttcaaagcacaggtgttttctcttacccttctttctctgcctcagtctctcccctgcttttctccttctctccctctgtcccctacttctcttcttcctatattcctctacacttcctctctccttctctctctcgcctcccttcctccctctcctccctgccccccaaccctttccccttctccctctctctcagtgaatatcaccatttcccaatataattgggcttgtccagttcgacttgtagaatattggagaatttcagcttgaacatatactctgagcaggagtggtaagaaatgtgactgtttagctcaaaaattaatagcttgaaatcagtgaagccactgtcacatgctccatctttgtaagcaccactgcttttccttttttctcctgtgacatggggggaggtgggatgggagggtacacagtaatcccactatcctctgatggctcagaataaggagaaaagaggcattaatggctcatgaatgtgtggatgcacaactctaaataagtaccacttacgactgtctcctagtatgactatgacttctctgttttagttcccatctttgagactacaagtagctcagattcgattttgatagtcgcacatccacagtataatttacttacataacaggtgttcctgaagataagtaaatgtaacttattcctactaacttctataatttaaagaataaagcttcttttgtattatataattattagattatatatctaattaattattagtagaagagaaaaaaaatcatccatgaaccatctcctaggaacagatgaccaatattgatagtttcttggatttctttataggcatttttgtctaaggtttttccttttatctgcctgttttacttagttgtgatcatgctatatgtatcatctttagtcctgttgtttgcacttaatatcatgtcatgtgttttcaattgttataaacttttgtaaacacatttaaatactgcataatgttctttggaatttacatagcataatttaaccattctcctcagtttttgaaaactacatgtggtattttcaagttgcttgcttttataaacaatgctttgacaaatatctttgcacatatgactttttccacattgaggtgatatttccagaaataaagttatgagattaggaacaccgtgtatgttattttaaattcacaaggctgtgtgagtgaagacattgttttgtttgtctgttgttgttgtttacattttttatttggaaatcgtttcaaacttactgaaaagttgcaaaaatagtacaatgtatacccgtattcattttacacggattcgcctcttattgacattttgttccatttgctttatcatttgtgtctgtgaactctccctctgtctttttcactccttccttctttatctttttcccttccatctttctctgtgcattttttctgaaccattctagggtaagttgcatccaccatgtctttttgcctccaaatacatcagagtatatttccgaagaataagattttcttatgtaactatggtataattattagcttcaggaaatttaacattgacataatacttttatctaatcttctgtcagcattctccatatttcagtttggtcagttgatctaatgatatcctttatagcaattttcctccctacagtgcaagatccagtccaggattacatattgcatctagctgttatgtctcttcaatctactttaatggggaacagttcttcaggctttctttgtcttttgtgacattgacattaaaaaatatacagaactcccccacctcttttattttttaggtaaaaaagttttgagtttgatgttttgtcatgatgagattaaggctgtgtattcccaaccagaataatactgaagtaacatgtccttcactattattctggagattacactattacatccagaggtacccaatgtccttctaccctttgttggtgatagtaattttggttatctgatcagggcattgcctgatttttctactgtatagttactatattaacccttacaactaataagcaatccgtgggaaggcactttaagagcatgcaaatatcttgttcctcttcaaaactcaccccttagatttaacatctattgatgatccttgcttgaaccagtcttttctatggtgattttccaactataacacttcatcaacctttaccagtcagtagttagcattctcctataaagaatttttctatccattcatccacccatccacccatccacccacccactctcattgtctgtcagtctgtctatccatctatctgtctgtctgcctgtctgtcagtcgtattgacttatagactcccctttttagtggtgtatagttcactacttttcttaattattttggtgctcaaattgtcctagatttaattggtgggggcccctttagattgtctcttgtgttcttctaatatgctcccatcattttctcagcactaactttttctggtgtgagatgtgctaggcttatcttgtcctttccctgccctagccctgtaatcaaccatttctctgatgacttctgtttttgttttttgggtagttttgtttgtttgtttgttttttttttagaggagaaaggtattagaaaccaatattggggtgctaggtgtgctgcttactaacagggtagatttgattctaggccttttttaggagacaggaaaaataatatacacacacatgcatgtgtgcatacacaagcacatattttaggaattgtgagttcacactaatacttccaagttcaaaccattttcacagagaatgcttatctccattctataatgtattattcttccacagtgaaaaccctgctgcctaacacatttgttcatttactcagtcctttaatacatctaaaaatagattcaaattatgtcacccatactactacagaaaaagacctactaaaaagttcaggacatgttttccctccacactttcttagaatagggtagatagtaaaattttgagttcgtaacttatattattctttttctcacctctcttcatagtggttatgtttttaatttgaagtacaatttccctttgcttcattttccctttgcttcattttcctttcaattttaggtttttatctttcccatctttgtttattaattttattttttgaatatgtggaacactaatatgctttccaaattcaaaactctgtataaaggtatactgagacatgtattactgctagaagttggtcatttatttatagcaaatggggttcatctcttcaagtttaaaatgatcaactttattttttaatcaagcatacttattagatattcaaagagaagaaaagcaacccttgattcttgtgaccagccttagctttttgtatagtagaaaataagagatgtttggttcacagataaggcaagtgacaggcacttcacgacagaggcttgcttagcccctttgtctgtgtacaatgggttatgttccctgcttccatacactgttgctacttggttgttgttgttgtttttatattttacttcttgatgctagcttactggtgataaatttcattagttcccactcttctagtttaactttgaaaacatctttgaatagtgggtatatcaactatatgcatttttcaagggttaagctcttgatcacatgttgctttggttgaatgtttgtctcctccaaaactcatgttgaaacttaattcccagtatggcaggcagtattgagaggtagagcctttaaggggtgactgggtcatgagggctctgccctcatgaattgattaatctattcatggattagtggattaatgagttatagactaataggttataatagaagtgtagaactggtggctttataagaagcggaagagagatctgagctagcggactcagccccttcaccatgtgatgccctgagccgtcctgggactctgcagagagttccttcaaacaagaaggctctcaccagatgtggctccttgaccctgtacttttcagcctccataactgtaagaaattaattccttttctttataaattacccagtttctggtattctgttataagcaacagaaaatagactaagacatgtgtctttgtttttttaacaataagacttaaaaatacatttaatataaaggctgacatatattccagctctgcataggatataagtgttcctcccacttagggttgtggtcagatatataagctttcttttttaatatttggaatttatggactttgcccatgcaatagtctcatgtccttttctttttcaaaattacaacgggtttgtggaatgatggactcacaacagttaatcctgaatgacttaatgaactgccagacaggttaaggtgaaatggtgttctaggacagatcttgatttgtagaattaagggtggcaacaaacttcaaaattgcttctttcattccagcaggtaattttgttagaggtaactcaagtaatcttaatatctgaatgtgttcagttttatcctgttcttatacaggaaatcccaatgcagggaagaaataaagtagcttgaacaccaaagatactagaaaggtagagtctagggagctgtcagcaagctttgcttctattttttatactggtcagttgtgacttttgttaagtcaaagaacttagaaatttagatgaagggaggctgcctttgtgcagccagttagctggtctgggcagtcaatttgagtggtgaaattaaggctttatctacttatatttgggaggaattttctggcagattgcaaaatcttgattaagttagccccagtttaatatgtacctgtggcgggcttttttttttttttttctttaatcctttacattttcttgttataaattatgaattggtccacttcttattagacagactttgtatacattccaaggcaaacataaagtaaaaatcatattttcaaatatgtaatagaataattgagatgattctcagatgcatgtcccttagtagagtcatagtgaaggcatttgctggctggctggaggcattgttttattgtctgtttcaactcttgagagaaatgaacagatggagacctgtattagaagtactcacacatagaaaaagctttggaatatttttagcattgtactcaggagcagcaaatcctatttccacaattttgtgtatttgttagtgtgttatcttgttaagccttttttcccatctgcatttaatgggtcagttgtttctaacttgttcttttgaaatttttaattgaaaatctgttttttttttttttggaaagcacattttacaaataaataaaggctgttcagctaggtggctaggtggtaaaaactaaaatgagtatgaatgtatgttttctgtaagggttctgaaaacaataataggatctctttaagctctactgtatagggaggcgagtgatccatcaaaagcacagtcttagatttgggtcttctatttagattaggaatgttaagaaagatggatggtaaatgtcttttagctgtattgtccccaaaacatgaaatgaaatctaaagactctcaaagaaggtttcaattacactagcaaatgacttgaacaaggattgggtaaagggaggtcacgggccagtggaatgccagttgtggatttatattgtttaaaatgaaaacattatttccattaacccctttccactaacacctccaccagagttattttcagactgtacgtttgtaggtgttagtcatacttgatagaaatgccttatcacaagtgtgaattgcacagcctttccatgggtatatattttttccttgtccaatacacaatccagggtttcacttggctaatcctctagagaggtactggcatccctgtgttcttcaaacttgattttaaaatgtagcagtaagctacccagttgcaaagaagcatttgtaaatgttttaattaaaaacagaatgaatggattctgtgttgtggttttctgtgataacagccaatcgactgccaaatcacactgtgtacttgagtttagggagggaagagtctaggtttaagggtgactctcaatggatttgcccttaactgtcaatgtgggtttgagtgtggtttttgccctctcactgcaaatggagaaaagagttggtaagcagaagatgaagcatccttttaatgagtcggctatagtgtgcactcagggcagacactttaaaagagcaccattaatttgaataaaacaggagaaggtaggtactttgtacatccataaagcactgaaggggataaatccaattatctgttcaatatttaatggccatgaagttaaaaattttaaaggcagtacctcggagactgcttagtcaattctgtccatattatttttgacattcaaaagtcaaggtagaatagccatattgatggcagtgctcatcacgttggtctgccgatttagtggcagtgaccctgggatttgtgtttctctacacagatgaagatcagttgcaatttttttttttttccaggagctcttagggaaaccttaggatctactgagcttccaacctgtttctttcagtcctttgctattggctcttgctatgaaaggtaattaaggatgattaacttaaaaattcagatgcaaaagaaccagaataaagatcagccatttgggttaacagaagacaggggattttaataaaatctgtgtttcagaaattcctaagaaactctgttagagactctctaaaattccaacccaatttttataaacttttttgcactgtgcatattttctaagcaagtcatggggggaaaagataatttttaaagtctgccacgtctgtctgttctacagctgtacttagccactgatgcaggtgggcattgctctgtggttcaaaggcagctgaatcataaagcttctaagaaaatcgatgctgtagcgacacttggaatgaatgtcagtatgacagtgatttttgtgatatggtcttgaagctttattcttcttgcctattagctaatacaggatcctaattagccattaacatgctcttaccttgtatggtccaaactatagaagcatatctcactgtatttcagagaatgtaactgctggttaccttttcacttattctgttttatgtatttcctttcgcattgaatattctccttttgtacatttctgaaatagagctgtacgcttcctgggcatggatagcattcgatccctttcaacatagcttcagttgcctgtagctatctacctgtttatttatctaaactaatactatgtacagataaattttgacatgatgcaggtttactgttaaaatgttatagaagaatcatgcaggaagacaactttaaaatagattaaagaagcaaaagttaatacattgtatgagttaggagatgataataagacttttgttttaagatatgtcagagttttaagaagggctagcctattgtgagagcttttaaggagtctgtgattttccttgggaatacatgtaaagtccttttctttttcttccctattttgctacccatttccctttaaagggagacttggtttgtttcactctattttcaaatgcaaattcagcttattcttgtcacgtgtaccatctctaaggatgatacttgctgaagtctaaaactatttagcgttcctggatcttacagttttaagtagattgttccttgttttgctccaagtgtcttgagtgatttggctgttaaaccagcagaaacctttgttttcttagtttcctataaaggaaataaaggtgagaaaataatgatttcctggataattcaaagagaagatttaacataaaatctctaacatgccactatacaaggacttgcaaatcagcttatgttacaactcagcatgacaattgttaaactcatttatttttaaagagcttttatatgtgatacatgttaaaagagccaagaagagagggacttttagcactgttcttcttgaatataacatacatgtttctgaactcttacttggggtatttcatttgtttgctcattcttgatctgcacagcccttaagctgtaagctttttgaggacaggaaacctctcgtgtgcattttatattcctagaatgtatttttttttcttgtgtgacttaccccggatctttatattaacagtattattatttacataatatttctctttaaattggtttacctttttacccaacctcatgcaaatcagtattagccatgaaattacaggtttgttgggctgtatcttcttttaatacatattaatatttacattaaaatcctaattattgccacacacggtggctcacgcctgtaatcccagcactttgggaggccgaggcgggtggatcacttgaggtcaggagtttgagaccagcctggccaccatggtgaaaccctgtctctactaaaaatacaaaaactagcccggtgtggtggcgggcacctgtggtcctagcaacttgggaggctgaggcaggagatggcttgaacccgggaggcagaggttgcagtgagccgagatcgggccactgcactcaaacatgggtgtcagagcgagacttctgtctcaaaaaaaaaatcctattattagaacttatagatttttatttgtataccacttaaaagtcatctcatgcatcacacttgaggaatggtgccctagcatagccttgcacattctcacatgtagtcactatttgtttaattgtggaggggagggaataagattaatgtacttcgtgtgtcaggtattgttttcaatagtttacatatggtttctcttttaatccctataacaaccgaatgagaaagatgtctccattttatacataaggaaagtgaggctcactaaggcttagtgactttcccaaggtcaaatagttcagtaaaaattagagctgagctatgaacctaggtttatctgatttcaaagcttgtactgtttttgctacatgttgtggactctcagtgattagtgggttaaccttgtgcattactgtctgctttcctgttgttattcctctgtagttagaatagagttgaccctgaatggtatttacagtttgtcatcttgttctggaattgcattttgcacagtcttgaaagttgttgttaccaccttctttttttttttttttgagatggagtctcactctgttgcccaggctacagtgcagtggcgccatctcggctcactgcaacctccacccccgaggttcaagtgattctcctgcctcagcctccctagctgggattacaggtggctgccactatgcccagctaatttttttgtatttttagtagagatggggtttcaccaccttggccaggctggtctcgaactcctgaccttgtgatccacctgcctcagaatcccgaagtgggattcaggcatgagccaccttgcctggcctgttaccaccttatttttaaggtttgtatgaaagggaacctcttagcactactaagaggaatatgtttgttttggatttttaaaaagtattgctaattaagagtttagacaaatattaagcttcttatttaagttagaggtagcttctctctctgtagttgtttttcattttatgtagcctaaatcatgttatacttcagagatgaaacctggagatgatttgattctcatccaaaatgagtgcctgagttccattttcagcatacacgtatgatcatctagctattgcttgattacctctaattatggtgttctcactgtctcctctttagctattactaaaaaatgaaagagggcctcgacagccatagtcttttaatgctaatatcctagtatttaaaagttgcaagggagcctaatgtttgcttaattaatttatttattttggtggtagagaatagaaaaagttgtaaaaatattgtttgccttttgataaattcagaaaacattttctatttccccttaaatcacttggtttccatctcagataatcattagggtttcattttcattcagctggatagcgtacccagagatggtttaatgggatcacgtacactgatggatggtttaatattttgaagatggcacacagtagcacttttaagagaataatcaggactggcatgcgagggctgagaattgcttgagttcaaaaatcagagctagtgtaagtgcagttttgtgtaacttctcttcggctgccaactgaccattttataattcttttctttcccccgattgtatttttcttggtttcctgtttgacttatattccaaattcactttacatctttgaaattatggaaataaggaaatagaggaactgtatttcttcctttctgagtgtagcatctggatgctctggttttaaacgcgaaggggctgtaaaccctaggaatacaatgtcttttaaggaccggaactagtacgtcttcagaactgacttcaaatagtttatttcaccccattgatctgacctatatgtgttgatttttattatatagtctatactgtagggggaggaagagcctgcagttttactattacctcataaaattaattggtgcctaaaacaaatagtattaaagatactgtattttataacataccaagatgactgatatagtttctgtagggagtttttgtttttctgtgtttgtgtcaataaactcataaaatctgcagaatgaaatgagtcataatctcatttttactatcaaaaagtgaagttgagcagaagcatgaccacgtagttcctcccagtggctcaaacaagtaaataatttaacatgtcttcataacacagggttttgcttatatcaagaaacacaatcaccaccccttccctgttcaatgtaaggggcttagctttattggagtcaaaaaatctagtgcagtactttgtcagtcagtgaatattgtgagcttctttattttccctgttgcttttttacacaaatgtgggaaatgttggtatcacaagaaaatcagactacatttggtcttctaaaatgtaactccattgtccccatgctggactgaatttctttttaatgtgctgttttcctcaacccaacctttctatagggaagagtagtaagtttattgtcagtattgtggatattttaattgaagataaacgagttttctttttaaatgtcttcagtattacatatctttagttttattatcctaattttagtagattggcaaagccagataatcttagcaaccctaacctgattcagcattcattactgctgctaaatcaaataagacctggctaatagaaacatggcttgtgcagccattctttaatttaattagaatattatacattgcattgcacttatatgtgtataccagagacaaaacttgataatcagtttgtaagcactcatgctacatcatctagctagagacatttatcatttattgtgaaatctcctcttttgggaacctctttaaattactaaatatcaggattgcttgaaggggtgaagatggggctagctcacgtaatgtgccatcaaaggttaggaatttaggtctcattctactatagcaaagattggcaaactttttctgtagagggcaaggtagtaaatatgttaggctttgtgggccatacggtctctttcacaactactcagctctgctgttgtagtgtgaaagctgctgtagacaatatgtaaacgaatgagcatggctatgttccaataaaactttatttatggacactgcaatttgaattttatgtgtttttcgggtgttgtgatatattcttaagaattttttcaaccattgacaaatactattcctagcttccaggctctacaaaagcacatggtgagctggatttggatcacaggccttagtttgctgacccctattctgtagtttcctttcttactgtattttagttttcttatttatatatttatgtacttattgacttatacttctttgatggtttgctctgtatccgtgcagttttccatagtgcaggaaatgtggatggaatgaattttcctgtcattctcttatctgacagtctctgcttgatgtggcaaaggagaatcaggtgttcaacctccaatgagagtaatttctgatatcagttggtagttgctgtttaattctcaaggtgcagacaaggtggcggaattgacttatctcattttcacattctgggagatgatctgttagtcctgaggatgctgtcagttttctggtattactctccctgcgtggtcattaacaatagcagagtccataaattgatcccaggtttgaattgtaagttgttggccctgaaaacttggtgaacaaacttgctgtcagtgtttgtattgatggaaatagtctgaggtcagcttcattactgcaccctaactgtctcatacattgtccgttgatttttcggttgtgttgcaagagggttcttgtttcagacacttgctaccagacatattcacctcaaatatttacagtacaatgaatcattcaaacttaaggttggcagtgtctttttgaaatggtgttcatgaaggactgggttaatttatcagatacagattttgagaagtttttttctcttaaagcaaaagttcaatttgctaataaatcagtggcaactctgtcatctgacacatggatacttgtctctttcacactgaagcttgccactggtatcttttgcaagagtggacatattcttatctataaagtattttctagattcattcagaaaaaaataaagtgagaatactagtttccttcttgaataatggaacttaaagataggcctaggtatatgagttattactgttgcccattttgaatgactactgagctttggcgattattatcagcttatttctagaattatttattaagtagggaattttattcattgtcagatttgtaattttagctaagttctgattagatcaccttgtggtttcttgcaaacatttttagtccttgttttgtgtcatcatgaaagaaaatttaacaaaaagatgcatacttgctgtaactcctgggcatttttatttattcatttatttttagtcctgtggtttctctctataggtgattggaacacaccagacctctcagaagcgttctgctgtttccttcctcccagtaagcagattatttgcaagtgacttgaaaataatttcaagtattggagagctttcttctcagccacccttgccaatgttgtaggtgatgcacaaagttctgtaggtcagcttgaaatcatcatgcttgcaaggaaaaaaaaattaaaattgacttcaaaggacaactctgacacggtcaattaataattaaaacagttttttaatgagctatgcaattacctgtatgtccctggagatgatggtttatggtattattgcagtgccctttctttagtcatggcgcatgacatttgtaatttaaagccggctagacattaaagtgacagaactttcattaaccttgtctaaagtttgctgatgacaaatgacttataaaacatgctgttgtcaaaatataccacatatttaagtaccttaaaagtcctgtgggctctgagaagctatggagactcagagagacaccaagaccaccagtgtcctgtggaattacttgacagaatccccggtggctggcactatttctttgtactcaggtaagtggtacctgcttcagacaagagcttcatgtacttttcatggctctctggttcaggtaggtttcccacgggtttttataccacgtgacacgattctctcaatcagtggtttatgactattgaataatttcttctaaacctgctttgatatgtaaactttcaagtctttagaagcagttttattttttcatcttgaaaccatttagcaattatgttttgattttagctttttttgtatcttggctttctaaattcttagccctctgtttgcactatgccatacctctcttttgtcttctccctgtatttgaaattttcattttttgtagaaactatgtagaaacatcctctaatcttaaaaaattttctcatcatatttcttttagaagaatatcttgaaatgctaccaagggagatattgcaggtggatatccttttatgttataacagtaataaatatatagtaattaacattaatgtgcaggtattgtttgccaggcattatgctaagagttgtatctcatttaatcctcatggtagccagagcttatagcactatttccccatttacaaatttgaaaactgaagcacaaaaagattaagtacttgcttactgtcttatagcttgtagatgaaccaggattcaaatcttgactgacaccaaagatattattagtgaccaccaagcaacatggcttctcacttttgttttttcaaaataaattacaagtttgctatctggaaagataaagtatagcaaacttctaatttatttattatttaataattataaccacctttaattattaaatagaaagaattgttatttcatgtttgtgctatgcaatataccaataaatatatgctggacagcataccagcaaatatgaatttaatattgtaagttgagtatttatagcttattcgagagacttgttaagagaaattataaccaccttttaactcaagtggcatatgatagatatttcataagtatttcctattattattattattattagcatactccctacgtgcaatatatcttgattctgtcatgggtctatgtttcaggattggttccaatataattagagactacaactttaacaacacattgttttattccatttggttaatgtccatacctttcttaaacactatgtaagtattatacatcacaaagtattaaatattgtcatcgtatcaaatacatctctgtgttcatattgctgaatagtagtctactcttaactattttttagttgaagtataacaccagggaggtacacatagtgtaaatgtgcagctcagtaaattgtcgcaaaatgaacacccgagtaaccattaccgaggtcaagaactttgccagcagcaccccagaaggcttcctcatggcctctcaaaattactgcgcttccttcctccccagtgataaccaggatttgaactataatgccatagttctacatttttttgtttgcttttgcttttgacattttaaaaacttcttattgttgaaaatgtcaaacacacaaaagcagagggcatagtgtattgaatatcatgttcttatcactcaacttcaacagttattaactcatgaccaatattatttcacctgtaatctcacccactcccccaaccatggatcattttaaagaaaattatagacattgtactatctttccatcaagatttcagtatgtatctctaaaagacagggattcttttttaaaaagataaccacaataatattttcttacctaaatacttttgtaccaacaatatccaggcagtattaaaattctgtaattgccttatattattattactttgaaaaaaacctttttatttgttgagtcaagagtcaaatgaagtccgtgagttataactacttgattagcacgccaagtttttcttagcctatagcttcttcatcccttttttctccctcgaagtttaagaaactggactgcttgtcccataattgcccacagtctgattttgcttattatgtcttcctgatgttgtttaacatgttttttaaaaatttttttatttcttattagtcaaataagtctatgagattcaggcttacttttcttttttggggtatgggagggtataaagggtaagaatacttcataggtaggtatataatgtctgtacctttttgtatgcatgtgatgtcagtaaccatttgaagatcactgcgtagatttattctttcagtgagggctgcaaaatggtgaggatcttattctgccattccttcataaagagaaacttccccttatcatttaacttaagtgcaatatacatagaatggccagacaaatgactgattctttacctttatttactgattttcaaaataattagttggttctcagcacccttcaaaggtatttatgaaagttttgttttgctttagtattattttgaatttatagggttaaacatgcttcaatccattcaattattattcttactgatgctcaaattatcctgcttttggctagtggaagactcttttattatgaccccagaatctttgctaatatccttttctggttgcgataagatattccaggctcatcttagaaggttttttgttttgttttgttcttgcctcaaacctggaatcagctatttctcctagaagctcatttcttttagtggaaaattagaaactatactctggtccctgggatgtgcttattcctactggataggtcactgtttttagatctttttagtgtacagaactaggcaatgtattgttgttgtcttaaagataaaatgtataaggactccattttgactcttccaattcaaattcaagactacgtagctttcacttaaaatcatgtatttgtgttttcattcatgcatgtgaaaaatcctgacaccagcattggagattcttaaactgggatacatcatacgcacagtagtttctgggaggtaaagcttggcatctgcatttttaacaatttccacaggtgattctgatactcacccaaggatgagaaccactgatctattttttacgaactattttatgttatagatacttaaatggaacctcccattttcttcttagaatcccccttttctttgttgattgtccacattctttcttcttcttcttcttctttttttttttttttttttttttttgagacagagtcttgctctgtcacccaggctggactgcagtggcatgatctgggtcactgcaacctccacctcccaggttcatgcaattctcacgcctcagccaccggagcagctgagactacaggcgtgcaccaccacaccctgctactttttttatttttggaagagatggtgttttgccatgttggccaggctggtctagagctcctgacctcaagtaattcacctgcctcagcctcccaaagtgctgggattacaggcatgagccagtgcgcctggccaaggttgaccatattcttgatgagccacctgtgtacaatctgaattcttttcttgtttaactcattggtctgtgcatctgacagtaaagttgagttatttcacttctgtgaaagccaggctgcagttatctttgaccgcttgaaatgctaaaatacaggtgaacctcacaactaaggctctgcccaaggccagagagagaatcctccctcattgctttgagcagaatgcctggtactggagtagatttgcttaaaggcaactctgcatttgataaaatatcagagcaatttatgtccttgtacccttgttccttttctttcctcttaggcagaaatgttaattgacaatcaaaggagtaacaggtgcatacctgaattcacaagcctttggggcccatcttgaatacttctgcagatccaggcctggtttaggttatgccttctttcatccatgctcacctgagagttccagtgttttccttgttcttgtttctgcattcagagttctaaaatttgactctggctggtcattttatcacttctctctcttagagtagactatagatctatatctgaacatttagcttctaattgatttgtattgataataggtgaaaaagaagttaattagcctggaaatgactacaccataagatcagactttggttaaaaatttaaccacattaattttgataatcttttacattcatttaatattagctttgttttatgttaaatttgcaaactttcacatttttatcaatgttcttgagagggaggcaaagaaattctcaatttatgatgcaaaatggaacttcaggtcaattatttgacctctgtgatttagatcacacatcttataagtgggggagcaactgctcagtctgattcctggtatttttttctgttataaagcacactcttaaaaagaaagaattcaaagttgcttccaaaagtacaatataagaaaaataattttaggaaaggtcaaaaatgattagaagaaggaagtgagaattctgttaatttagtctggctttgagctttctgtttgttagccaagacataaagggaaaactttggctcatagaatacttatctgattaaagaaagcacatgaatttgcatggagtacagactttttttggcattgaattctgtgaagaatatattatatgatcttactaggggatatctgtaacaatgaattataccttcactgctaattttgtaaaagatataaaagtaaacttcaaatgagcatttttcttactcttcttaaccattatcacatgaactcattgccaaggttttaggtatgatgatatcagatgaaaaggtacaagatatatgcttaagtgaagcatttacactaggttttagtgttgatgcaatgtatcttttttcattattttacttttaacctattagtctttatgtttaaagtgattttcttattataagtatgtagttgggtcttacttaaaaaaaaaatccattagctgggcgtggtggcaggtgcctgtagacccagctactcaggaggctgaggcaggagaatgacgtgaactcgggaggcagagcttgcagtgagcccagatcgcaccattgcactccagcctgggcaacagagcaagactctgtctcaaaaaaaaaaaaaaaaaaatccagtctgacaagctctgccttttaattgcgtgtttagatcatttacttttaatgttcttactcccatgattaatttttaaattatcttactatttctttttatttgtctcatctgctctttgttctccttttcttctttttctgtcttattttgtgttgagtattgtttattattccagtttatctcctctgttggtttattagctgtaattctttgttttagtggttgttgtagagcttattgtatatatctgtaacttatcaaagtcttgcaaatgatgttataccactttatttgtagtctaagaacctcatgactgtatgtttctattttcctctctcagcctttctgttacttttgtcaaacattttacttttatgcatatgctataaaccccacaatacattattattgtttattcaatttatcttttaaaaattaaaaataatttaaaatatcttttaaataacaaaaaagtcttacatatttactatatataaagtgcattttttggtgcacttttttcctccctgtcaacctatatttctattattttccctctgcctgataacttcctttagctttgcttgaaatatgggtctgttgctgatgaagtgttgctgcttttattttgcaccccatctccttttttataattgttattgttcaggcaggacagtaaatcttgtccctgttaacttcattttggtgagaaatggaagtcttcattagttttaaatgtaggttaagttgtcggtagttaatgctgaattctttaatagctgagttgcagtaacattaggtattcactgtgggtgcctctgacttccttcagaggtcaatatatagggatcagggtggataactataaaatccaggttgtattcctctgtacagatagtgtagctgtattagtctgcttgggctgccatattaagataccatagtgtgggtggcttaaacaacggaaatgtatttctcaaagtctggaggctggaacttccaagatcaaggcattggaaagattggtttgattctgagactcttctcttggcttatagacagccagcatctctctgtgtgtttgcatgacctcttctttggacatgaacatgtgatgggggaagacacagcaagctctctgatggctctttttttaagggcactaatgccatcatgagggcctcacccttataaccttgtctaaccccaatttcctgcaaagggactgactccaaataccccctcgtcagggcttaggacttcaacatgaattttgggcggatacaaacatttggtgtatatcagcagccacaagttatagtgttctgtgaacctgaagctttctccttataacttgtgtagtttgtggttaaggaccagagccatacatctgctctgatctctttcttacccctctaggcatctctgtggtaatataaggaacactttacccatcaatagattagaaccttacctgtacttgtctggagagagaatttttgttcccgtaattctttttgaagtgtcaagaacttatttagtttcactggattaaagagagcaaaattatcagcttgaatcaggagcaacttgaaggagagatcagggctatgaagcctgttgggagatctgcatttataaggagatggcttcagcaaggataagtcatatcttaacatcttagtcttaaaggacagatttgttgcaaagaaaatggaaatggtaggaaaaagtgctaagtcttttttccgtggcagcatttcagaattgtgtattgtagctcaatttttgctgttgcctctcccttctgttaatattagagtcagaagcctgatcagacacagtgctgttttttctgcctaaccaaagctgtggacccgtgaaacctgtaaagatattaaagaattgagaaatttcatgtgagtgaggtggttgaattttatttctgttgttaatattaggtgattgcaaatctacttattttgttacagagattccaggatgccaatatgcccttaaatttgttcagaattttatgtgggattatacttttatattttaatttactttgtaacttgttagctattctttctctaaacatctgagagatatttttcttcccggctttaaaatttaattgaaaaataaaactgtgactatgttttgttaagttaaacaatactctctgccaggcttcttaaggcaaataggattataaaatcttacatgcccagttcatattacttgctctgaacaaccgattaaccactcccatagaatcctaggagagtttaaaaattacagctttcttaatgtttctcacatttgcccaaaggtttcaaagaaggtgccataagaaatatatgaaggtgcccttggagatataggcaaagaaggtgctgtggaaattagctttcttttagtggcatgtttgcagtgagattgggctattaggggcattttagttttcctgtacctaggacaatctgctacttacaatgattccctgatgcctttataaagggaaagaggcttccgtttttaggattcatctaacaaagtgttattgcttacctaattttttttttttttttttttttttttttagattttttttcactctgctaggcactggggagctataaggactaagaggacctcttcccctctagaactgcactactaaattgggtagccattagtcaccttgactatttcaatttaaagttaattaaaaattcagttccttagtagtacaagacacattacaagtgctcaatagctatttgtggctagtggctatcatgttggacagcatagatataggacattcctgacactgcagaaacttctgttggacagtactgtactaggagttattattcagatttatttacccacaaaatatggttgttgtagtagtgtttttagtctcagagtcatgttaacccaaagatggataggaaaacaaaaatatgctacaaggaaaattattatgggctattcaggtgttcttgttactgtatgtgcccctaatattaggattttcttcacagaacattatcattcaaaaaagaagtcattacatatattcaggttcttacaaaggctctcatgttactgactaatctttcaattacagtactttattttgaacatcaaaatggctttcatgaatgtttgcttatgatgcttgaagaagttactggtaaaatcagatttataaagaagaaagatttaacacaaatttagtaatttggtcatgacctcacaacgacaagtgttgggcattattgtaaacaaccctttttaagaacagataaagcagcaccacaagtgtcattgctatggagatcacaacccctgcaggatctatgacaaactgtcctgctatttagcaaattggtacttgtggtaactgtgccatacatgaattttaaaaagtgctatacctcaaacaatctggaagggaagacgatttgctcaggaaagtaaaaaaaaaaaaaaaaaaaaaaaaaaaaagactctagtgataataaagacatttttgtgcctggggagtttttaatgaaatgtgagaggaaagaaaacaaggagcttttctaaattaaatatgttctataatatgccatgtgattttgaatgtgcctacaactaaatgaaggaaatactatacctagacatttaaccatttcaatctcagtcttaaaagttaatgtaaacaagttgttaaaaaaacttattttttgaggaaatcatctcatatggaaaatgagagatcatcttatattcaggattcacttaaatttgaatttggatatataaagtatctacttctggagataaccttactgtttttttttctaagaaattctaagcatttccagagaattgattaaaatttattaaactacagaaagtgaaatcagaagactactgaataatttcttaaaatcatgttaaaatatataaaatttatatgcatataagtatgctaaaagtatacagaaaagaaaaacgtggaagaaatgcaacaaaatgctaacagtggttgactgggcagtgggattcgtgttctcgttactcctttattattttctgtttcattttctataatatgcattattttaataattagaataaaaagaaaatgtaaatgaacacttaaaaagcacatgttaaagagaacacttgatttgatgtataggttcatcctttgtaggttaagcaaatggaaagaaacttctttgtacaaaaactaattccatgtgggcattggatacctttctcagagaaaataggttgtctagccagcacaccttgtttgttttttaatctctaacaacgttcaggatatcatacaaaagagaagtcttggaaattcttacatatatgatgattatttttagagatggggccttgctatgaggcccagactgaagtgcggtggctattcacaggcgcaatcatagctcactgcagcctcgaactccggggctcatgctatcctcctgcctcagcctctggagtagcggaaccactggcacatggccattgtgcctggctttacataagttattaagacttttgttttgttcagcatatctgggtaacattgcatggcctatcccaaagtctgaaatattttaaattccaactgacaagatgttaggacactcaaaggaagcattgaccacacataaaattgtttaaatatgctcagcacttttcagactatttcacattaattcctagtgaaataatgtagaaagatgactttaggggtaaaggtaatttaggccttttttgtttctttttttttggtgttgacttactctgactttgagtaactcaagtcatatatttccagtttcctctgtgttactcctcatttgacatcttaagaaagtttttggttttgtttttgtaaattgccttatttggaggaaatgcatgttctaagaaatttgaacacaagtgtatccttgggatgctatttctcttcctttctctagtgccattttttacatcacacagatttggaaacaaaatgacgtatttctttgcatgttgtgtgatgagtggaagaaaggaaaaaattagcaactctctgcatatacaaagagacatttcaggatctccgaggggatatgaactcccaggtactagtagactaagcctctttacaaccttacaaaatcctgtacagatgacctgtgtgtaaaatgcactgcctgttgctttggacatcacttgacactaaaaagctatgcattttgtatttttgcatgtcagaatcttagccagaggaattaaaaataaatatttaagtaggttcctgacttttcctatcaaggaggcactgagacaggcaatttgcttagcaagtctttttgttcacctgtttttgtgctgcggagaaatgtgatgtttgcttctgatgattccaaatgtgcgtgcattatatggtcagagcagagtatagaaaatgccagtgctatctgtgcaaggctggatgataacatgtgacccgagtgacagaaataaatgtgtcctggcaaaaaggagtcattaatctgaatgaaaatattaccacacagtgggcagattaatcttggcagtttatggcaatggccctcatacataaaacctattctgtgttcccacaaatgcccaatcaatcagtagacagctgccccagtgttaattgtgaccgtgtgggacacttgggtaaaatcttcccatgttaatgatcctgaatttctaaatggtcttatcctaaaaattgattcttagtttaagcaagattagcaatgtgggcctttcagcttttttgtttgattttttgaaaatgtttatatatttggggtttaaacaaagaattttttttttattttttgccgcgctcagaacatcttagctaatatatgaggtaattaaaaagttactgtagaagtcttcctgtctggtttgattgatgctagtagttggttaatcaaaaaaagtcataacaaattataaatacataccttctacttttcatgttaatattaaatctgtatatatatatttttgtttttttatttgccaatatttgatattaggtcaaggcctagttgaaattccctgacatctttcttgtataaacaatacccacaatgctaatctttatgattttcaatctctgtctctctaaattggcatggtaatttaaagatattgggaaccaatctaaatgcagaatcctcctagatttttactaaatttccccaaaacttcttagttatctaacctacatcagctttagtattttttaatgactcattttgatgaaggccattcaaacattctgcttaattttgatagaaacaatcactttctgtttacctcgtatttcatggatttatatggaataatctgttcacatactatttaattcatacagttggagtaaagaggcttgggaccaaacccagtacacttgtgaatgtgtgactcagctggtggggctagccatgcctgggtacattagagaagtccaccaggatgactctgcagaatgcccttcacatcagggcatgttctacagagggaatggacatcatcatcgcttcattaagcctgtcacgtttttccataaacatctacaaatagctacaggtgaaaatggataaagaatataatatttaatattgttttctctttatcaaatgaaaagccagatatagctaagtaaatactaacaaaactgttattaaatgaggtacacgccaacattaataagttctgaattgttcgttttactactttgtacatatattatgtatgtggtatattaattgattgctttgtgaagctgtttaaaatttttcaacagtagagagtgataatgtgccaaatgtgaaataaaattgcagaggtgaaactgtcaacgacttaagtgttactactgactgacagtgacaggattcaagaagtatcatagataccaatatgctatgtcacaagtataatatgaccagagtggatgtggtccctgctaaacaagttaaacaaaaaggctttttttttttcttcctagtgctttatattttcccccactatagaaaatgcatgaagactttttaaatggtgacatttatggccatgatagatgtgtgcttctacaagaccaagtccaggtgtttccattgggaatacatggaaggagttgatttaagcaagtgattacttaaaaaggaaaattaaaagtgtggaaaatggataggagagaatgttaattgggagggtttcaagtataaaggagacttaaggatgggcataaatgtaaatgttaggaacacatttgaaataacttggccttagaaaagaggtttatagaagcatataatttaagaactgtaggttttgaaactgagacacactcattgccagacagaataagaatgaacatatctgaaatttcactgagaaagatcacagatatacagtcatgtgttgcttcacgatggaggtatgttctgagaaatgcgttgttaggcagtgtcatcataatgcaaaaatgtagattttttttttttgtggatcatagagtggatttaatcaaacctaaatggtgtagcctatgacacgcctaggctatatgctacagcttattgctcctaggctacagacctgtacagcatgttactgtaatgaatatagtaagcaattgtaacacagtggtatttgtgatctaaacatatctaaacagaaaatgtccagcaaaaatatggtattataatcttacgggatcactgttgtataagctgtacattgttgaccgaaagttgttatgtggtgcatgactgtatttaaaattataagaacacacaatcccaaggtcatttgattcaggccccaataaagcactaaaatagtccaagaatcttaccttttcccattagtgaatgaaggcattcttcagacttcctagttgaactgatgcaatgatcagtggaccttgaatcaaaggaaacaaatttctgtttatcttaagccttctcaattgtgcttttgtatgcattcatcttattctttctattattcttaacttagtcatccagattgctgcttaaaatggaaaattagcctaaaatggagtgggcaaacaaacaaatcgatcactgtccagagtttctgaatccttaacccatttcttacaagaagagagggaactattttctttaatattgaaaagacgttacctggagcacccctaatcaaccttggtccacaagttgaatgatgcagtagaatttagaggattctgacattcagagaacagcagccaactgtcagaaaaacggtaggagatggtaataatgacctcgatttaaggtcactggtgcttgaatgcttgcggtattttggcactagctatgccacgtcctgctgatcatggaacaggtgccaggttcactcagtggggccaaaggaactttgagtatagtgacaagaggctaaagagcctcagccgcttggcttataagattgattcttaatggaagattgatctggattgggtgaatctgtgattttttttgttggtagggacttgaaattggtgaatgagataaacatgaagttcagtctccttagcagataacaacagctttgctctatatttctgtcacctagcacctagtaggagcttgactattgaatgaagaatcaactgaacacattttctaggtagacttataatagaattaatatctacattggatttgtaaaagtaatgatggtaccagtatacatttaattagtgaggagtacttcctttggggttataagtataaaaatactcaataacctcattgctttattgatgtttgtttgtgaagaaggattaaatagtatcttgccttttttttcctttgcttttaatcatccattgttaaatagaggcttaggccatctgtctctgccaagatctgcctcgatatggaagactgtataatagagatactaaaaaaaacctctctaataatctgtttatactattattctccaggcttttccctaaaacagttttaagtaaatttcttaccaactaaactgcaaacttatctgttaattaaaactatttttgttgactaggtcgcagtgctcttgaggcctgtagaaattgtacttagctgccttttctcttgaagataagacagaaaacaggatgccttgttgggtttaaaaagtaaaatacaaactgtcagttttctgatatcaaggtacatttttttgagaatcaacattccaaatggccaatctggttaactctcagtggtataagatagggcaaaggaaattgactatgttttggtacttggttttattttattttatactaagtgcttcttaggcaattctgcctcatcaatattctgtagatgtaggcatcattaacctcagtgaaaagtttattacaagccactgttaggacttgtttctgaataatatttctccagtatttaaatgaaacaaactacctttacccaaactcagtcaacagagtttaagattattcagaatatggaaaaataaggtttagggcctgggtgctgtggctctcgcctgtaatcccagcactttgagaggccgaggtgggggcatcacttgagcccagaagtttgagatcagcatgggcaacagagagagacttcaactctaccaaaacaaaacaaaacaaaacaaaaaactcgggtgtggtggtgcacacccatgtcccagctacttgggcaggtgagttaggaggattacttgtgcccaggaggtcgaggctgcaataaggcatgattgtgccactgcactccagcctagggtacagagtaagaccctgtctcaaaaaaaaaaataataataataaggtttgggtgtgtgatttggggcagtgtttttggcatgcacgggtgtattgtgggtgtgcatatgcctagacagacatatgcacaatctgaagacataataggcattttcctcgaaataaatttggctcttagaattgctttcttctcagtcacatgcaaaatatggtgaagaatcataagcagtcataaatactggcttgtatacaccattcagggtcaccttcaacaaaatacaagtcactcaattttatccagcagtcacagtgctggatctactgtgggactcttaaaatgtttcaagtgagagctggatagtcataggtagaatctgagttatacattctgatttcctttatgggctatagattaactgcaactctgatactacttcattataatcctactgacttctttctggtaagagaattgccaggtacccagctctgaatgtcctgaatcctgtcagtagctctagtttataaaggatgatttgctaatgagatttcacagacaagcactagatattgacggtgattcaatgttgtatgttgtctgagtggttgttttgcttcagggtacttttttattttccatttctttagcaacctctttccccaccctgctcttgcagaatttgagatcaagaagtagggcattattaattacatatagacattatagaatgttttgggggttcttaatcaaaatgtaaatgatagtttaaaacatagtttgaatactctgaatgcctagtacctatgtagtcagtaaatagtgattgccgtgaggactacaactgtatcaagacagttttatcctagtgttcagttaaaatcttaaaaaacataaaataaaattcttgctgtattttatgagtaggttttaggaacctagtaagatttttaaggcagaggaacctttagaaggggctcaaggtcacagttggcactcctgtgaaaacgtgtgaattgccttccagacacttttattttgccttaagactgcaactatgttctgtctaggggttctgctgacagcacgaccacacaagtacagtttcctttctgtgcatcagcacaatcagagattgcaatgctgcttgtggccattaggatttagtcatggaatgtaaggaaatttcaacaggaaatgtatctggctttgatatattttcatctgccgtagtcgcttaacctgcatgcctttttggtgtcagcatttaattctaggatttcatctggaatatgtgtgtatatagttttctccatcactgtctcaagtaacccatttgatgctgttcatgtacaggccctgttatcattaataatcatgtaagcagtgttagcaggttttggcaaatgcaccgtttcatctatgccgaggaacataaaactcttatcagcaatataatttaatttcactgtacgtttttggttaggatgcagccaacaaagtcagcaaaagtgcaagttgtttttagatggctcagttgtattatagttatacttactgtacctcactgctcttaagtgtcttcaataacaaatacagtatcagtgtcagcttttggatttgtgacttatacaaatgtcaaagtagcaggtatattattttatttccaaagagaggcttctttatcctctcctctacatgattaatgctcttggccagaatttaagctggcagggcctggcacatagtaggtgaacaatgaatggatataaccattgttgtggtttttattcaaggctctcaacatgtgattgaatgaaggatacctagaaattgaaatatcaaggcaattgtgaggataactgaggaacactgggtgaagcttgtgtaatgtcatgatttagcacatgccttattattttcgtaggtctcaaacttaaccctactaggagagaaactgtatttggaacagtacaaagcaaatatgtcagtgtttgcatgtgccattctcttacatttaaactaaataaatttaaaacattcaacaaagattgagtcaggagcgttttatctgattcatccttaaaaaaaagctttctttggtgccaggcatatagtagacactcagtaaatatttgttggcacactagcttggtgctgaatataagacatattcaattttgttgaatgaccaattaaaaatgtaggagtcactgtaatcacggtgggacccatttctctaaggaagtttctaatatgactgtgtcatgtctttgccttgggctggtcttctatcaaggttgttactgacatggctatgctttattggggtatctactatataccaactattatacttggttctcgagcaatatcatctcatcttaatacattgtactagtgagaattacaagaaatttcatattaaaatgaaagagaaattttaatttaatttttatatccccaaattacttaataatctgctaaagggaatagttgtcctttccctctacgtggattctccatcagaagctcatgcctttgagtgatatacttggccactcagctggaaaactgtcagtcttcataacaacattttagatcctagaacctgtatggaacagtttctcaaaaatttctaccatcttatgaaaagccacacagatgtgccttcattttgtagtatattaacaagatggtaatgcatgtatgtatacaaatctatcctgagagtcttctttgagggttgattgaaaactcactcctcatcttggttttgtttgcttgatatgggaagcacaaaacatttatctttatgttctgacaatagaaatagtagttggtatgaaatactcggtgggcgaagcagtgaatgataagggaaatagtattttgcatgttgcatttgcaaaggaaactcttagaaaagtggctaactttagatttacttatactccttagagttcacagggatgaatttaggtggagagatgatatttgaaggaaaaggtacaggtctacgtacagtagactagattaggtgatcttgttgtgcaatatgttttgaaattactgatgtgacatacattaatctcaaaataattatgctgtgtgaaataagccggataaaaagagtgtaataattgatatggttcggctgtgtccacacccaaatctcatcttgaatcgtagctcccgtaattcccacatgttgtgggagggacctggtttggtgggaggtaattgaatcatgggggcaggtctatcctgtgctgttctcgtgatagtgaataagtctcacaagatctgatggttttaataaagaggagtttccctgcacaagttctgttcttctctcttgtctgttgccatgtaaaacatgcctttcaccttccgccatgattgtaaggcctcctcagccacgtgaggcctttttctttataattacccagtctccagtatgtctttatcagcagcgtgaaaatgggctaatacaatactttatgaatctttttctatacaattattttaaagattcaaaataaatgacaatgagtgagagaaggaggatcaatgactgcttgagaggtggtggatggtgctgctataggaaggatgacagatgggtaccaggaatttttagaagtgatgagtatgtttcttctcttgattgtggtgatgttttgcagctgcgtacagctgtgccagaactcattaaactgtacacttcatatatgtggactttattatgcatttattagacctcaatcaagctattaggaataaaatgcaattttatggcaattaccacattataatcaagtaattatctagtgtctgtctgttgtactggactgtaagctcccaaaagacagacttttttctgttttatctgtgttctcaatgtctaacctgtgagaggttcctattaagtactcattaaattaaaacatagtttgaatatagtttaatactatattaaacatagtttaatacttttgagtaagtaaatagacgtgttatttagctaaagcacagacagctattattgactgagcacttgccatatgctgggtgctgtgctcaaaatacattatgttatgaatcgtcacaaacagtatttttgggaaaggcaattttgttatccccattttacagaaaagaaaacagagcttagaacagttaagtaacatgccctagaccactagctaataagtggacaacaccgaaatcaaggctgactgattgaaagtctgtggtggtaacctctgcgcttggaccctttggcatctccttatggcctgtatagatttttaaagctgtgacagggaaattttcaaggatataagactcacttcctagccccacactttcaacacaatgggaacttcagtaaacatttaaaactgaatgaatgaacccagtgctgaaagtctgggaaaatctttttccttctgtttactttcccggtattaatagagcagcgttgtcttcctacacgtggctctgtttatactggcagaaacctgaatgggaagcaggctggggtacagcaggagcgaatgcctttgggggagcctgggcttctgccagcacatctagctggggttcctgaaaggcccgagggacattgcttctccattgtcatattggagattttgttccaggagggggatgaagggagcatatatttcaattttcttcacagttgtattatttgttagattcctctaaaagacagttgatttttgtaagccagtattaaaattccaaaaagggattacaaaaatgtttgcattgtaatgttataacacagttggaatacactttagtcttcccttttggttataatgctatcttataagaattgtagaatacaaagaatggttacatgtctgaaaataatatatatatttcttcaggcaattggtgtttttgtgttcttaaaaaagccattacagcatcagtttgtctcgtgtgtatattttatagtagtacattaaacacaaacactgacaaaagttttttagtttagcttaaaagcagtagttatttctcatatactattaggtagaggtcacattgggatttacatggactgctgttttccctgttgaaagggctactttaaacaaatacttgaaatgttgtatagccacatttaaaaaaaatcccttataaggatatggaatataccactgatttcattagacctgtcattcactgacattcccctatttatttatttactcattcaaaaaatatttatcaaggacactttatgtgccatggtctgtgtcaggtgctggagggccaatgaaaaatgttcgtaagtgacatctgctttactgcagggtacttgtcgtttcctcctgtagttttgcttttggagacattagatgtatcaaaattgttaatatttttatatttgcttgtaatttcttccaaattcgcaggttatttaggtcaacttatttgaccttactgtcctcattatattatataatatgtattatataatatatataatataaaatcatataattatatgggaaatacttagaaaatatagaatattaatttcataaaatgggctagtaacttcttatcctatgtgagttatattatagtgtacctcagccgggcgcggtagcttacgcctgtaatcccagcactttgggaggccaaggtgggtggatcacaaggtcaggagtttgagaccagcctggccaatatggtgaaactctgtctctactaaaaatacaaaaattagctgggcgtggtggcacatgcctataatcccagctactcaggaagctgaggcaggagaatcacttgaacccaggaggcggaggttgcagtgagccaagatcacgccacttgtactccagcctgggctacagggcgagactccgtctcaaaaaacaaaaaacaaaaataaacaaaacctacctcaggaaaagagtaatacgatgcataaagtataagagaactgttcagtaaaatcagcctgctttctgaatttgtgcctgtgtgtgtgtgtgtgttagtaatttaaacttgagctaaatctgtttagtttttgatttgtaggtagtttgcctataacttgatctctctctcttttttataccttttttttagggtcagaggtacatatgcacgtttgtaatatggttaaacttacgccacagtgatttgttgtaaatattattgcatcacccaggtactaagcctcgtacccaatagttattttttccgatcctcagcctcctcccagcctctaccctcaagtaggccccagtgtctgttgttctcctttttgcgttgcatccatgtgttctcatcactttgctcctactgatgagtgagaacaattagtatttggtttttctgttcctgtgttagtttgctaaggataatggcctccagctccattcatgttcctgccaaggatatgatccattcttttttatagctgcatagtattctacagtgtatatataccacattttctttatccaatcagccattaatgggtatttaggttgattccatgtctttgctattattgtgaataacgctgcagtgaacatatgcgtgcatgagaacttgatttctcttgagatgacttttgaatgatttccttatctttgtgttctggattgaaaatgctgaaggcttttagagtgataatttctattaatctcattctagcaaattaagcttctacaagatgtagaggagtgtttttgttcaagaagaagggaaatgattacaggcaggatttcttttaactggcatgagtggacacattagagatgtttagggaaattctttctataatgtattgggatgaatgaaatgaatgcataaaatcttataattaagttaattattactaatttgttgagagtccttttttaatgatatggagaaacactctggagacagttatcttgaatcactctgaaggtggttatcttgaatttcagtgttatttgaaaacttctagttattatagtcctatagttttcagagatatatgtgatatacataaacttggctctttcccatgacctccctattgctgtttagggcttaggtcactttatattgtaattattgggccacctgtaaatcccttcaaagaaaggactgtgtcctattgaagtttgtgtctccaatgctcccatcagggctttaagcagttgttggctgtcctagtagaagggtccgtcatcaaggctcagtaacctcctaccatttcttgaccctccttccttgccctgccttgtccagtttatttccaggtcttaagaatatcagggttatgtgggtggaaagaagttgcttcgtcctctgttgcagacggatctaggcttgcatattcacttgatctcttatcaactgtgtgaccttcggaacattacatattctttgtgccttagttactcaatttgaaaacatgaataatcatgcttaatttatagagtcgtgagaactaattaaaataatgactagcatgattgtcacatagtaggtccttagtaaatgatagtttccccatatcttttaatcagttcaccttcttcagtaattttttgaaattctttcactgcattagattcttgttaactgttttccctattgtttagtctcttctgcttccagatcagcagagatattgctgccagattaaatgtttattaattttgtactgtgtgctggacactagattttttctttcctgtgcatgattttaaacaaacaaaaacagcccatcactgcttcggttcacagtctggccgtagcctagttttttagccttatcttgtgccatgcctttcacatacctaacaatccttacaaattgaatactcctagttcctgattgttaggaattgggatgagacgatatccagggactcaggaaggctcaaatcccatcctaccaatcacgtctacccacttaccaccctcctttcccaatgcaaggaggagcagaatgagaatctgaataccactccctgaacctccaggtcagagctctgataaaagctggattggattatggattgaggcatgaactcaagtcacccttcaacttctctgcgtattctatctcagtctgggaatcttactagtttctggccaactgcactaaagattgaagttgacatgagagaaggagcttgctaagagttgatttcaaagagtggcatatataacagtcttgcattccattaactgaaccaaaagaaagctttaacaaaatgttatggaattaattaaacttaagtttaaatagcaacatgccgctatttagatttaattaagtaaaattaaaacttcacttccacagttgcacttgctacattgcaattctcaatcgctgcatgtggctagtgatgtctgtattggacaatgcagatgtaaagtattcccaacacaggaagttctgttggacagtgctgttataaacacagtaacatgggtcattcatcaccagtacattacagagaagatttccctaaacatctctaatgtgtccactcatgccagttaaaagaaatcctgtctgtacccatttccgtttttcttgaacaaaaacacttctctacatcttgtagaagcttaatttgctagaattacataaatagaaattaccaaactcaaaaagcctttagcattttcagtccagaacacaaagataaggaaataattcaaaagttatctcaagagaaatcaagttcgcatgcacgcatatgttcactgcagcactattcacaatagcaaagacatggaatcagcctaaatgcccatcagtggcagattggatgaagaaaatgtggtacatatacaccgtggaatactatggagctgtactgcctggcctggaaatctggctgtgacaggcactagctgagtgaaacttacctctgtcttacctcgactgcaagatggggataataataataatatctatttcatatggcagtggtgaggattaagccaattagtgtaaaatacacaaaaatactaaaaacagtgcccatcactgtacaatgctgtgttttttctaccttctcctgctcctcctcttcttcttcctaagtcttctctgttgttttactaagaaacacatattctttgaatatggaagagaaaggaatttactttgctcatcctgtaatatttttcctggagatgagctcttagctggcttctgggaaaagaaaatatttcctctattttatccagcactctgcatagcctgtgacagttatataaaaatatcagtttagatgtgttagagattgttttagaagactattccatgtaagccatgcattggttcattcattcattcttgcacaagtgcgtgaggattgcttcttaaatgcagggcactatatctgcatcagatggggacttagaatcatcattccgtgctgacaagccctctgccaaagggatcagtactccacttttgtatagaactgggacagactttccgtcacaattttgttatgaaactgtcaggtgagatgttgcactgaattccctttagtagatttatacagtttcagagattttgttatggtaacttgggggcttttaatttgattttattggattctttttttagactcttaaggcagtggtgttttcatcactacatctgcacaatttgttattggcattattgggaattgcggatgtaaagcagtctatgacttttgggaatattaataaactcctaaagtacttgttcaattagcttctctgacctgctgtccagaggttgagctgtcattaactgaggaagcttcctatggtttaagtggtggtgaggaaaaccgttgtctttcttcctcctcacctttgtcttgcctacttcattcactactttcttgggagcagtgcaggaagaggccgtccaattccagagctgcagaggggctcctatgccctagagaatgagaaagagcatgctggttaggttttatattactactgtgcctatttttgattaagagaatgttttctgtgtgtccagaggtttaaaagattaataatttattttacatatctggagaattgcttctctctgcctcaagcattagggccagagttctgtattttgtttgcatacaatttgaagtgttttctctaggtcttataggggagaatctgaagacttcattgctcgctgatttcagtcttactgatgttgggctcttagatcagcttgctagaatacaaaaattattcttttatcgtgacaccaaattctgtaccctgggactccaagtggccattgaaagacttgggtttaatgttagtgcctcatgctatcaactgcctatctgttgtgaaattcttttgttgtcagatttgtcgtttccttttcagatagtagatcatctgatttagagcatgaaggtacatcttcctaagtttctatgacagaaagatattgaagaagaaggagaaaagccaaataccagagaccagacaaggtggcaggaaattgcaaacatggtggaatttccagtctttttcattttttgaagtcacagataatttaaaaacttctcgcttttactttttttttgtttgtttccttgcttttgcaaccatgtctatctgccaacctttctaaaatgtcatgatgtaattattttaacaggcactgtatgctcctttatttgggggatattaacctttctaaacaaaaggaatgttaatatacactggaaacacaactaatgggatttcatttttcttgttaggcaagaagcttgacttttttttttttttttttaacttctcgtaaaagaatgcggcaagtgaaataattgccttaagctaatccatgatagcgattttaaacgtgactttccagatcacttttatatggcttagaaagaataatgtgattttcttgtttttgtttgctttagctaaacagtgttgaaggatgatataaattcaatgaattcaaaacaaagaaaatgctaattgctaatgcgctaagttcttttaaggcatgaaatacagtgtttaattcataagcattgtttcgttttatatagatttaatttttttttttagttagtatgggacaaactcagaataaattagccagctagccattttcttaattattgtgtattcctatttgatgtttaaatatatatgacctaaatatgttgtggtttttattaaaaaaaaaaaaaagaaaaaaagaatggtcataggctctcagatagtgaggcaaagcacttttaggatttctacagggcacctcctctctccctggctttccacctctccccttccctgccttcttccctccttccctttaatatccactgaaccattttcacatacttcctgaatcacccttttgaccaatagcatgcatttgccatggcatggctaggctatacatctttaatgttaaagatggtaaggctggtcaggcgcggtggctcacgcctgtaatcccagaactttgggaggctgaggcgggtgcatcacctgaagttgggagttcgagaccagcctgaccaacgtggagaaaccccatctctactaaaaatacaaagttagccagtcatggtggcacatgcctctaatcccagctactcgggaggctgaagcaggagaatcgcttaaacccaagaggcggaggttgcagtgagccaagatcatgccactgcactccagcctgggccacaagagcgaaactccatctcaaaaaaacaaaaaacaaaacaaacaaagaaaaagatggtaaggctatgaaacaaatgaagactaattggcccatgtggtgtaaagccatgactttggcctttttattgtgaactacctccccgacagttccatagacatgtatactctgaacaaaatatgagtcattaatccctctaatggagggacctagaacagtgaaatagggaggacaggaaggagaatgatgctgaattgaactgggatcttcttgtctgtcaagcccttgaacagctttccctttaagcaacaaagatgacaagtttttgctattttggattagtgagagtgtacgaaatggtttccctttccttccaggcaaaaataccaacagaatctggcttcggaatgaaagtgctaatttcatttggtgactttcagatttgaaatacgggcttgaacaggcattgtgcattagtcagctgaggcagtagaggttatttttacgatgctaattattatttcctgacagtgatttactttatgttgtctactgtttacgcccccaaactagccattgttttaggaacagaattggttgggttgtcatgctcttttcaaagacaaatcttactattttatgcatagaaatactttcctgtaataaagaagaaagctttattgaagagaatcttgcatatgaaatgtaatctggataaatattcaaaactaataggtttatattttagtcttgatttttaaagtatatttttctgacatcctaaccaccttgctttatgtgcattaaagttaaatctgttttactgggatgcggctgaatttttgttactcacattgaacttagaaaggagcgacacatatagttaacaaataaatacaaaatgaaatcgaatataaccccttgatgcgtaaaggaagataagtggaagacagagttgattgcatgtctggaagtatatctgcctgatttatgctctaattttagtactgagtttcctttgtaatagtaaaatgtcacattagcatgtcccttttaataatctaatatgctaccagtgacaataaatacatgcactgagtctagctcacggtttctcaaacttcagaggcccatgacccttcccgatgtagttaaattgcccagatgaccctcctgtcatatatttttaattgtaaagcacttgaaattaatcatgttttatttctttttaaataagcacctcaagagcagtggtgagcagttttgctcacggcacttatccactcttaaagaaaattaaagattggaaagggccttgcgtctcagtggcagcaaagccatctacatgggggaaaacatagcagacaagagctgcgtttgatactcctctacacagtctcttgcctgtgcacttagtgaaaattggcaccggtgaatataacaaagtaaaagcattttgaattattaccgcaagccttcaagtggtcataacccaagatttcaagtacctcagtgaagggtaaggttttctacaatttgtgtggtaactgagtgcctttaatttaaactacacggagctaatctttaggagaattggaatctgcctctgaactaattatgatttacagaaattgataatttgtcttctgcatgtgtctgcaggaagaaattactattaaatttgattaacaaatgacagatttcagcctagtaatttaccatctttattagcaaacttagaaaacttcttatagtaatcttttcaatcatgtcaactctattctggtagttaaggtttatgtagaagtaacccatgtgtgtggctttagtaagaacctaccttacctttaacaaagaaatcttggtgtggtttctcttttcaataggcaagcactactcaaacgctcacactgatttcccatggtacttagaacttaataataggtaattaacttccaaaaatgaataatctgttcttttgaatacattcctgcactccctcaaaatatatgaaatcgtgtaaaaggaagtagagcattatatcatatgttcaccttatttttcgtgcaccactttgtcaaatgtttttctttctcttcaaacagattgtaattgtgtaatggaggatactattggctaaagcagtgccatatatatgattgacattgtgaatgattctgaatcctactttggatgtacataactgagatgtaaaactattgtagcatggcagtatagtgagggcattaaacttttccttacatgagtgacatggtgtagttttcaaaagtatgttaatgtacatgtttttatatagttgaaaaaatattccattgcactaagcagcctagcagaattgttacagtggttaaaaatgcccttttatattttcatgtcaggaaaatcttatcttcttgcatgtcaaaaagggaatttgaactattagcctttaaagacccagaggtaaagtttaattttataatgacataaaataaatgttctattatctaagtaatagttcaccagaaaagtctgaaatggcctcctttctcaaggatgcagcttgtatgtgatgctaatattaaaatggacctgccaaattgagtgatgggaggtgctaataactccaagtggggagatgaaaacaacatattgcacacacctgctctcagctttatgtcagtctcattaagttattgaatgggtgagtataatggggaaggaggggagtcagacgtatgccaagaagcagttgggggggctagtaccccacaacatgatgagtaaacggattgtctttggcgcaggaagcctgcttgtcactgtggttcatccatgacctttgacctgaggatgcaaaagaagtttagattctttatagcagtctatcctggagcgttgtgttggcaatgaagattgttttattcacttgtacccgcatcttagtttactggtgttgcattgagagtatatgtttatatgcttatttagtttaggtactctaaatttcgttctgtctctttcacctttaggatgaatcaatagggtttttttttgttttttccttctgacaatgtttggtattattattctttgttaaatacggctatacatagtctgatctgggtcaaagaaagtcattcaggcagtttgctaacagttgttgctagtaatggtcactcttctaaactggaacaattgaacaccaacaaaacaaaaacttaggaactgaattgtggggcaagcccatataaggtgtgatggattctgggggactccagaggttagccggtgaccctttggcttgatccgggcctctctctgacagctttcattcattttaaagaaacctgggaaaagttgatattcagaaagtgctggttagctgtctgttactcaccccaacaaaaaagaagtttcatgaaatgtctttcaacaatggaaaaaaataagaaaaaacaaaacaataagcaggccaggtgtgtgtggtggctcaagcctgtattcccagcactttgagaggctgaggtggggaggatagcttaaggccaggaattcaagatcagcccggggaacatagcaagaccccatctctatagaaacaacaaacaaaaaccaaaaacccacaatggcttcctgaagttatttagagttgattttgtaatgttttatgaaattttaccccagtaggttaatccaattctgttttgcttattctgactttgacattcacttgcagtccttaagcacgtatcttttgaatacaagccaagccatgcagtgggtggcaaggtaagtcaatttgggattaaaaggctgtcagggataatgctgaaccacatgtggatatttgagaggtggctgcaccccactttgctctctgtccagcttgcaaaccgaagtctctggaaaaaggaacttcttaaggtaatatgattcacgtgagcagaagagcccatcagaggctgtctggtttcagtagagatgatcaacagataatgtactgaattggtaggcataatgaggatacaaagaaaagacatcctggaaacctaatgaagacttcactttattatcttttcagataattgcttagatgcatgtacattttccttttaaatttagagttaaaaaaaatcaagttgaaacacaaacataattttgagtgaagaaatgcttgagcatctgggaggtagagcaagagggtccttggaagggtatggagcagcacagtgaggctgtgacaaatgtccccctagccactggcctctatcaacccaaagtgcttctcagaaaacaaataataaaacaaacaggatgtaaacatcagcaacttaagtacttgccagctcagttgttgggagtgggtaaagctaaagattaaagacagcttgacaaaatcctacacactatccagctgagttttacacattatgagatgtggtaggacagaatgagggtgtttaaaaaaattattgctattatgcagctggagggcaatgggctgagttgggaatatgccaggagaacttgtgctgcttgtgtagataaacttacaggacttcagctttcaaccccatccaattctttctgtcagattctcttaaccttgtcctgtcccttgctgagcactgacattttcagagcagaggaaaatcatgttaaatttatgtatgaggaggggtacatctgtgtgtattgctgtactctggttttaaatgtttgggctcttttgattagttctgcccttggtttattttgtagtctcagaagtgcttataaaccagtgctggttaagagtctaatttagcttctcctcatgttctttggtcagcgtggtggcagtcttttgtggtcgtgcagaagagcctcagcccctgctgtgggacaaaggggaccaaattgtttgctgtccctagacagcctaggcctgttgcagcccagatggtgctttttgtcagtttagtttattgggattctgccgaatactttgtttgatgagagagttttaacactgaagaatgcatgaaaacctgggatgctggagaattgtgagagatgggcttggaaaggaagattcaagccaaattgtagagtaccttgaaacctgacaaaggggaatatatttttattttatctgtagacacgtaatggggaaacattgaggatgactgagcaggagagagaccatgtgaaggatggactgaatggagacttgtatcaaagagtctgagtatcaaagacttgtattagagagggttgttgtagtaatctagtcagggtatgagaaatggtttgtattagagtgtcaggagtagtcgtggcaaaaatatatagatcaggatgagggatgggcctcatctcacaccctgactccagtcaatggcagtggctccctggagtacactactataggaaggattttgtaaagttttgtctggcctcagtggagggtgaggtaggggaggagttctatgaacagttagtggtgtctgccatggttgaaacaatggagaagggggacaccttttctgtgcagatgttgcttctggtagatataatccacaatgtaatgggagaagtactaagaatcagtaaattatggagggtgtaaaagactactgatatttaagcctggcggaccggacttagagaaatgatagttaaaggagaaatatccagcaaacaaagatatgacattgaagtttgggactgcgattagtaccagagatttggattggaggtgatttgtatagaatggataggtgattttactcttgcaatttggattgagggtgggaaaccagagagggctgggggtaaattagtagaggtcaacttgaattcatgtgtccatatcaatgctgaactgattgtgaacatttttacatcttgagtcacattgtaaggagaccaagaagtgaattgagcatagtaagcatttggaagtaggtgagtgtttggggttctctgtctacaacttttaaattttaacaaagctccacgatactctatttaaactcttaaatattaccttgtttattaattaccaaattttagtactgacttgagcaacaggtctcttgtctgctattttgagattatatagaatattgacactaagaagaaactcaatcgtaactcctattagagaagaaaaataactcagaagggttaaagttttgcccaatatcacagagataataggtagcatggttgggcctgagactcaggtcttgtgattttcattctaagtgctttttctgtattcgatgctattttttttttttttttttacaatctgtatgatacagatttgaacattatttatagaaataaaggataaatgatgtgtataatctgatagaataattttgagaaatgcagatattgatagtccccagctttttgcctttttattgtgctgattcatttatatattcataaatgtatttaaaccagtctctgaatatttaggtcagtgctagtcatttgctcttataaatgggaagagactgtataagttaaccagactgtctaggtttaaatctgagctcttccatttcttacctatgagatctttgataaacttcttacctttgtgttccagttctcttatttgtaaaatgaggatgataatggtgcttaccccattgggttactgtgaaggttaaatgagggtggatatgtaaagtacttagaacagtctttggcacatggcaagctctatatatgtaagatcatagccttgagagttgaccttttggattcaaattctaactccatcttttactagttgtttgaccttggacaattaacttaatttttctaagcttagataacagtctgtaccttatagggctgctacgagaactcagtgagataatgcagataaagtacattctcaatgcttgacttcaaataaggacacaatacaagataatcattttcattattaccatcataatcttcataatgaagaataatatgataatgaacatccatgcacataaccccttgtatctcttcatgaatgtttccttagggtaagttcttagaagtgaaattgctatcttcctcttgactttctacaaggtctttaatctttacaaagttttgtatattgaaaaagacaagctcttattgaacacatagtaggtgcaatttaccagcataggcagaggaggttatataaggttgaacatttctttgtctatattgactttgtaatctagtgtgagagttaagaaatgaaactaactgtggtaaaatatgcaatgtgagatatatctttgaaaagggacaaagtactatggaaacacatcatttgaagagagaaatttcagcagagggaaatcaggaaagacttcatgcaagagatgaaaaaattagatatctatgatgcatagtgttttgatagatgaagatagtgaagcatatccttggcatagcaaggtttgtcatatggccatttctgtcactggggccttagggtttaagtgcatatactagcccttgactttggagacttagagaccggtaaggagcttatcttctctccactcactctgttcctccatgtagaatctctttatcttccttccatctccttcaggacacaggcaatgtttggatttcctagtttctctcagaaacatgatactacatcgtgtattacttaagacagattcaggccagagtacacatacaactcttgagttggtcaaattggaattcagtttctaggttctccatgattactttaatctgatttatctgaagaaaagttaatctgttggtatgatctgatggcaaggctttacaagtatatgtgttttaatgtagtcgcaatttttaaggtaagttaaagcctttccagttgttacttatttttcagtgacaggacaaatggctggcataatttatttttgtttgtagatgggtataactggagatcttatatattgggtatgcattttttatgaatttatagaattttagcctaagacattggattagatgttaaagcatttatgttgataagcaagaagtaaattgtattctgatccagtttgtataataatgtgcaaccaacccaattcactaagtttgtattggtaattttgcattgctatgggacttaagttacatatataagagttgacagttatttcagcatgtgttagacttgaactccagaaggttaaggggaagttctgctatttattttctgttcaaaaacagatgaaaaaaggatctttatattattctctgtcacacaccggtaaatacatggtcttcccaaatccaccacgaaccaatgctgtgagctgcttagtttgcttgtttccctaaagctttcatgtgacaaatttataattttgtatgttatttctaggtcaacagttagattaatgttttatctcctgagcaaaaacacagtgcttctttgtaaactttgttatcttactgaaactgaaaattgcaaaacaaagaattttctagttctcacattccttgatggagaacagtgtttatatagaggttatcttgtggtttattttatattctacttaactttaacatttctgcaggtagaataaatatcctatttaaagctttcaaatcttattaattaaaggtagttgtcattactaattgtttactgagttttatttatttttgcttcattgtagctcatgaggaggccacctaaattgatcagaatataagcttatcctagtcactgaaataatacttagtgccggcaacagaaatatactcaagaaatatttgttaagtgaataaactgataatgacctaggaggatgcaagtcttaaaaagtagttcagaatatgcagattttaccatcagtctgagagttggtaacttagaacattttctatttgagctagtatgaatttaattttttagaatgcgacgatgtcatcagttcttaagtaggcctgggaactcattctttttgaaatatattacattttagagactttataacaacattttcttccatttgcatgtattgacagttttttatgttctggctggtcacagtgggctcatgcctgtaatcccagcactttgggaggctgggatcacctgaggtcaggagtttgagaccagcctggccaacattgagaaacccccgtctctactaaaaatacaaaaattagctgggggtgatggcacatgcttgtaatcccagttactggggaggttgaggcaccagaatgtcttgaacccgggaggcagaggttgcagtgagccaaagttgcgccactacactgcagcctgggcgacagagtgagactctgtctcaaaaaaaaaaaaaaaaaaaatatatatatatatatatatatatatatatataatatttattatgttgtgtgactccactctgagaccaggggaaatttgattttaaataaatcccccttatatggcgtatattatgacctggcttttttttttttttttctttccacaaccccaccccaaaacacttaatacatttcagcaactgagtaagcttcatcattaaaaactcttagcattgccaattctagttatttttcagagtgttcctagaaagacacatcctaaaagagattgtcatgaaagattttgtatttccttaaaggaacaatagagcttgcatttgtgatcaaagatggaacagagataatcatagaagtgacccaaatgccataaaagcaaaaatacagccataaacctacacattattttatctttatttctatttaataaacattttgggtatgtacagatatgaatcttaggtagtcattatgctcaggtttttcagtcattgagggaacacatgattgcagtggactccagatgtcgtcagccagagttcaggattcacacgggaacgcgagctttatggcagctgggtaatttggaatctcatctttataacttggatgcctggtctggcatggtagagtggacctgatgagtaggctgatttgaaatctgatccgaggtactttagtgatcttattggaaacaaaagaataacttagaatacgtggagggatgaatacttttttttttctacctcttttatactaaaatactatgaatctcagttgggcatgagaggtagtgaattgaagagggtttgtgtccgagctctctggtcaaagcttggatttacttattctgtgctataaattaaaaggaaatacattctcttaattggtggtgaagagacttgctgaaagttgcccaatttgtaattaaactttggatctaatattctttttttcattttctatactttgatattagatagctgcttgtatgactatacatgatgaaataattggatacatgttaaaaatgaaaactaaactctgcataagtaaaattagtgaagaggcagaaggtaggggtggcctctatgaagcaggtatgagaaaagctccatgaagttatgattacatttgtttgatttttttaattacaccatgtttagatggttatttaaaagaaggtggacatgaactcatcattttttatggctgcatagtattccatggtgtatatgtgccacattttcttaatccagtctatcattgttggacatttgggttggtttcaagtctttgctattgtgaatagtgctgcaataaacatacgtgtgcatgtgtctttatagcagcatgatttatagtcctttgggtatatacccagtaatgggatggctgggtcaaatggtatttctagttctagatccctgaggaatcgccacactgacttgggacatggatgaaattggaaaccatcattctcagtaaactatcgcaagaacaaaaaaccaaacaccgcatattctcactcataggtgggaattgaacaatgagatcacttggacacaggaaggggaatatcacactctggggactgtggtggggtcgggggaggggggagggatagcattgggagatatacctaatgctagatgacacgttagtgggtgcagcgcaccagcatggcacatgtatacatatgtaactaacctgcacaatgtgcacatgtaccctaaaacttagagtataataaaaaaaaaaaaaaattaaaaaaaaaaaaataaaaaaaataaaagaaggtggaacagacctctttaaaatagaaagtacaggatcttacaaagcatatagcacttgcagtctcctcccctcttcttatcacttttatgccaggaaggattaagaaatttgaatatttggagacaaagcagtgtgagatgtaattgcccaatactgaaggagagttgagccatagcacacaccacagtagggatgctataaccagttatgcaggcggagacacagtgtgcttcctacgtgtgagcatctgccgttggtcagtgggggccttccaaaggctgaagtgattatgatacttgaaaacatgttgggttcaaggatttataatctatttttaaaagacagtaaattcaaggtaaaatagagtacactggtgtgtaccttagatattagttctttaagtctttctccaaatggtagtttctctaaaatttgagacatgaacactaggtaatttagtattaggcaaatatttaaacagtttaaatgagtttattgcatcctggctctattacttactagctgtgtaagtaaccttaggcaaattatttgaattttttgcgacttaattttcttgtctataaaagatatttaacaatggtttctacctcttagggtttttgtgaatattaaatgagttaacatatgcgaagtacttagaatcgtttctagcatatagtaacaccgtacatgtgttagctgttatgatggtggtaatgatgttctcctcctcctcctctttctccttttcctcctgctaacatttgtagaagtgtgaactttctctcaattcatctactcgcttcatctgagaagagccagtcttcctgaccagtattttacaacccgagatacccacttagggccaaccagtatgctaccagctttgagcttaggttatttccaaccaatctcttaaaagccggagtcaaaattcaacctcagttcagtaatggtaattgtttttctctggtcatccctaaggtgatttattactagacgtatcagtatgaccctctcataacatttttatctattaaaagtttcctgagaaatggatttttaataaaccattatcacaacagcattattatcactactccatggtgtattaatttaaccacatctgtggccctctagtttatttatagtattgtgatagaagtcatggggaatacaaagagggcaaaaaagaaaaaaatatatgtataacttagttgggaagacataacaaatgcatatcaaacgttaaacagcattaagaaaaaacattagtaaagagccaagggaggttagagtaaggaaacagaatgcctgccctaagtcttggggcagaaatagaaatatagaaggcaggatctcaatacacagaaaggaggggtgcaggtcgaatggtggaggaagaatgtctgtggtgcattaagagaaaccatgagcaagttggtttctctggaaaagagaggtgctgttgagaactaataggatagcaagttggtaagtttggaagacagacaattatgtggaaagaaagaaattctgttacctgcaacacctaatgtctacaacctatcaaattagcccatgtattaagcactgataatgccagctaaatctcagtcagaagctaaggaactggagaacatcaaggacctagttgcagaagcatatcagagctgctggccctgaaaaaccctgaaagagccgggaattaagaatttcatctttggactcagccaagcttagacagacttggttttaaactcagtttagctacttactagttgtattagtggaaacattaattaattaattctctgtacctcaatttcctcatctgtaaaatggtgataaggttaatttgaagatggcctctttgaaatgtgtaaggattgaatgaaatgggtaatttatgtaaagttcttacaaattcaaatatatagtcagtacttacttaacggttactaataataacagcaacagagtatgtttcaaccagacagaataagttcaatttaattttttttcatcttgagatgccatgtaaaatgttaactaatgttccacttctttaagaaaaagttggaaaaacactcatacttatttttaaccttactactgtgaaatgacagtgcttctaattctggctgtgaaatctagtaatccttttaaaaggattaaattgtgaacaaacacatcaggaaagaacttaaatctagtgtttcctgacttattttggttctgattaattaaatttttttcagaaagggtagaaaccaagagtaggtataattgaagagttaatcagaaaattaaataagggtactcattaaccaagtgttttagtaatagaggttttactgtattaggagttcccacttgttctttttctgcaaatgtggcactcggttttatttttaaatgctgacataaattgaaagtcttttataacctctgaagcatgtttcgcaaagtgcagtccatggatccttggaggctcccaaattccttttgagggatcgatgagatgaaaactgttctcataatactaagacgtaattgccttttttgggtgtgttgacatttgctctgatggtgcaaaagcaatggtggggaaagttgtgggagccttagcctgaatcgagttagtggcactaaactgtcctagaagtcattgtattcttcacctccacatacagtaaaaaagaatatccctgatgaagcagtaaaaattattaattttatgaaagcttgaccttgagttacatgtttttaaaaatagtttgtgtgaaggagaattacaaataaagcatttttgctacatacttgtctcaaggaagaagactggggagattgagttaaactatagttattcagacgcgtatttggcagacattttctggaaagcagtgagcctgtcattttaagagaaacaatggacattgttgtcagtgataaaattaaagatttcaagtggaaatgtgaattttttaaaacttgcatcttcctctgtgaacttgacagcttcctaatgaaccattgacttttcttatgatattggtggtgatactaatgaatgtgacttttttgatactgaataatgaaatgtgtcaccatttggaagagtgctgcataactcagtgaactaatattttccaaatgaccagtgcatgattttaaaacatcatgagtggctaaaagatccattcaaagtgcaggattgactaatgaattttaatgtgacagagtatgagaagttctttgatgtggtttcagattccacaatccaatttaaccatgaagaagccaccacttgttgagttttggtatagtatcaaaggagaataaaaccataattatctgaaaagactattaaaatacttttccttttacaactatatatatacatgaggctattttatttcccatatacttcaacataaacaatggatcacaacagattgaatgaagaagcaaatgtgaaaagccaattgttctctattaagccaaactttagatttgcaaaattcttttctaatttttttgctgtggaaaatgtagttattttcacaaaaacatgtcctttgtgttaacacgcgatgggtttattaagtggattcataagattctttaaaaaatattatcagttttatttttaagagtttaaagtgatcctgacattatgaactttgagaaccacacccctgacgtggtaaaattaaattttcctatgaatttttatggtttaccagtgcatgagattgccatcttgtgacaaaatagggaaatgcaagtatttttgaaaagctcatctttaaggacttggagtgatttctaatgactacttgttggaaatttatcaagagaaagatataagttcagatttccaagggctatgtcttaaaatatatgtgccaaaaatattaattttcagaaggtaagcaaaaaacagttaattaaatgcatatttctaaagggctgacattggtttggggccagtcttctgttaagaacacatttagtttttatgttcagtgtgtatatttcctattacactgagcccctttgtatgtgatgttatagactactcgaatgtgtatttactgttcaaaacactgataaatgtttgtggtgatattctggtggcatatagttgtccccctttattctcaggggatgtattccaagatccccagtggatgtctgattctgaggatagtattgaaccctatacagactattttccctatacatacatacctatgataaagcttaacttataaattaggcacaataagagattaacaacaacaataaaacaattatatcaatatgctgtaataaaagttatgtgaatgtggtctctccatcacctgatggggtactcatcaattgatgagtactgtactcatcaatttttagacccccattggcccagggtaactgaaaccatagaaagtaaaactacagataagggggggactactgtatcatcacttgtgattgacttaaggtttagtcattggttgataccagaaacttggctgataatattcttctttctaaagggaaatgtgatcaattctttatgatgtggagtttaggtccacactctggtgaagagtttgaatttgctgcccttaaatactacatcactgtagttctgtgtgatgtgtcctgtacaaacatgcagagtaaacattgttccttgccttctgctttcttgagcactaaaatacacagtgtaaatatgcacaaacatgtagaaggacatatagacaaatacagccttagccaagtcatgagagatgcagctgcaagaaacaggctcatgcataatgaacatttatgctatggcatagcttgtgtttttgcatccatgagctgtatgaaaaggaaggaacctcacttcgttttcattcagttagaatgaaggcccactggtcagttttttgactcaattcagctgattgttttcaaaataacctgttcttttctaacagttgtgtgtagggacagctgcactctgatgaaatgactgtgagcctatacgctaactactgtactaattttctgcctatatttactatgtgcccagtgactctgctgatgaatattttagacatcttcatgaataatgttactgcccacagtagagctgcttgcttgtttgtaaggctggaaatgctatcaagatgataccgactcccattctatataccaacgtgaaaataataaaatacctaagtaaggttgttggtcaagattgtctttgaggaatcatggatgctctgaaattggatgccaaattttacatgtaggtggatgtgtgtttttgagaaaactccagagcttttatcagactctccaaagggattgtgatctcataaagactaagaaccactagataagctttatagttttgaaagtgcttctccatacatttttatttgatcctcccaatgattttcagggaggcatgttgggcattctctctctttctctctcgatctctcaacagaagagcatgactcagagcttaagtggttttgtgcttcatcctgtaggcactgggagcctttgagggttttaagtgaggaagtgatctgatcagatcgtcctttagagagattgccctggtggtagtgtagaggatgttttaggggagtaggaggctaattaggacaccattgggaaaatcaggtaagaaaagatggttggccttgagtttgttgcagtcagattggaaaagaggggaggaatttgctaaacagctttgattttgaagaactgatgggacatcagggagaaaagaccagtaagcaattggacgttctagtctgggactggtgaggtgaggaggacctcgcacagggtgtatagagtgagaagtgaagagttcctggggagaaaatgtcagctagtgtttggctggagtgatggtcttagggaagcgcagggagatccaggaacatcgcttttttccccccattctctgtattcctgggttgacaagtagggattaaatatattttttaaccctcttcatttactatcagattatttatatttttatttctcaaggactttaaatttatgaagtttacaaaaatcagtcataccactctaatctaccttctgctcagtggaggcgtcaagcaaaggatgggttaagggtactcccctataatcaatatgatcttctccattcttagatgtggaaattgacacgttatcgagcatatgtaagtgccataccattccaactttacatacttctcaccacccctgctgcacctcacctccctaataacacttctgggaccgtggttgctttaagatcagctgacttttccctcagtgattcaatgcagaatcctcagtaagtagagcattccttttgatggctttactaatacccagatctcgtagttctttaaatccctcaactaaaatgaccttcatcttcatttcactttggctgtgcacacacatgccacacctaatagatctgctccactttgaatatttcaaactctattagtctcctctttgaaatagccttctaacttctacctgccccatccatgtttctcctcaacctgtcttctcttccattccttgttccattccttgttctgtccttgttttccagtatgggaagataggggagggaagaggctggcaactctcttcgaatccctgcttccgtactcagcccacaactattcagatggttcaataatgattgtgcttaccctgcagacttcctcacatagtattctttgagaatttccaactcaggttcttttcctgtttttttccccgactgttacgctcaggcacctgggcattgttagtaaatttcataaaaactgggacaattggatcaataaatgtatgtagaataaagaaatctatcagatccttccccacgcaggggaggggaagcttagggctgtgttgaactcaaaaaaacaaaaaaaaaggtctatatttcattttagttacatctcaactagctctgcctatgtgaatatttgtatgtgtgtcacctgatagtggtcagaaatttgggtccttcatacctttatttctattagaaaatcagcctttgtacccattttttttccttacaggtatagacttggtaaaatcttgataaaaattttctgcacatatttactctatttgagttaggaactggactgtgtgaatgctttttcttctaagccatgagtgatatttatttattttatttttgtcagttgtttccatggttcatgaattctttattatatatagtaggagtcatcaactggatggagaatcattgaaattgtaagtttaggacattagttggaataacctgaacaatgtgcttaccttttgggcccttaatttaatttaaaattaaatgagtcttatgatggcaagcttcacagatctgcctgcagggctttcagaatggaaatgtgtgtctctgtgtgtgggaggctcttttgtttagttggaaaggctaggaaatctttgcctaaaaacactcattgtttagagagcataaataactgaacataatgttagtgagaagtttaatttgagattgaaccactgacttccaagaatatagcagagtgagtggaagtgctatgaacaatgtcttccttatttcctttaaaatgcccatgaaattgtctcaaaaaaaccaaatccccagaagtaactacaatgagtggcaggcactgagcccattctagtttctggaaggaatttttacattctttcctgtagttgaaatcagatggagttgccgtttcttcaccaggccccccaacctgcaacctgattcctcctcttcacttccctgtttcagccactagtcatggaatcctgctcaacatgtaccctgtacccttttgttcatgtccagtgctgctgagtgttagttgattctgtaacagctgctaacatgctccttcttgggtggaggtggttctcattgaactgactcctggctcccacccaggttctgggctggtctgtgaatttaggtgcttgaaagtcaagaaccaggatttgcacctgcttccaatcatcctttggctccactttgaacacaagggcatctgcaaagacgtctacatgcggtcactagtgtaggattttcttgtctcctccattagactgagctccatgagggtggggaaggaagagatgagggtgggagtatattccttctcactgaatccccaacactcagaatagtacttagcacatgttgggtactgaagacacgcatcaaactcattaatgtaactcaatcgttgggaaggacttaaaagcagtcctgaagcatggtaagcactaaaggccaaggtcaaaccaagcccaaggatgtaaaaaagaaatgaaatcacacattatagatgaataattaaaacaaaattctgcagctccaaagcaaagaaattgtagagatctgcagcaatatctttctgaaacaattttcctttatgagacagttataaaagctgtgctttgtaaactcagtaagatacctgaagagtttacatctagtaaatgagaactttaaaaagaataaaacgaagtgaaaattatagtagataaaataaatctccattgtaaataaaaagctgactgtacttagaaaattcatccagttgatatggacaggaggcagggaaatactgggtaaaagagggtggttccctggcaaaggccccactctcaagcccagaaacccatggctctaaatgagaacaggacttcctgttttcacacccaaatgttctcttttggcctgctgcacccctctatcctgtacccatataaaccccagaccctaggctccacaagcagaagagcagaggagcagaagagcagcagtgacgtggtagagaaggagagaagagaaggaacatctgaacaccgagaggagttcagctggggatagctggagaggagatggtccatggaatggtcaaactccagaggaagatcatcttcccgctccatctcctttccggctccctatccatcctgctgagagccatctccatccagcaataaaatcctccgcatttaccatccttcagtttgtctgtgtgacctgattcttcttggacactggacaaaatcccaggtaccaagagggcactgagctggttaacacttaagctgtctgtggacagcagagctaaaagagcactgtagcacacccactggggctttgggagtcacgggcacccagccctagacgctactatgggatcagctcccaaaagtgctctccccggctcctgcacctgcccttctgtgtgctccccctcccataaggtgttagagcatgcagcagcccaacagacgagccacacccctgttgcatgtcttgtgaggggggtcagggaactctcccgtttcatagtgatagaggatagacttcaaaaaaatgcccagactgcaacaaaaaagcctagaaagacacagatccaacctaaaactgatggagattattgtggaagacacagcaaaacaatccactgtgataactattggagggacatttttcagttctaaaagacctgatcttgggtactgatataccacactacattccaggtacactttctaattattaatcaacattgaaaaatattcagatttttttttctaactagaaaacttgcaggtagagtaaggaagtataaaagtgctaaattatttgtccttcatttaagagagactaaaatgatcttttgggattatgttgagagtagttaagtggtggttgaaagtttaataaaatttatttaaatttaatagttcattaaaatttattgaaggtttattaaagttataaaaataactaatagaagtaaaaaacaggatgcccataaaagttaatatagaaaacagaatcaaataaaatgccataatctcatccggctacagagaaacagaactgttcttctttctttccttgtctctcatgtacatcttcttaccacatcccataagatatactgacaactttcttagggacttttttagcccactaaaagttcttttgtccccccaaaagagattggattctatatatatatatatgtatatacatatatatacacatatatatatgtatatacatatatatacacatatatatatgtatatacatatatatacacatatatatatgtatatacatatatatacacatatatatgtatatacatatatatacacatatatatgtatatacatatatatacacatatatatatgtatatacatatatatacacatatatatgtatatacatatatatacacatatatatgtatatacatatatatacacatatatatacacatatatatacacatatatatatagtgtgcgtgtgtatatatatatttatatttagatagtatataattaatttgactcataaaaattacaacattcctttcaaacaactctgtgatgtaggcagacaagggaatttagcacataaggtattgccttgtctttttgcaaaaagtatgtgattcacctgtcatggtgcatggtaggcactaaagaaatacttgttgaaggaatgaagacatgtataacttaactagctatacacttggaaaatgtaatttcatctacaaacaataactttataaataattgcactgtttctcgcccattaaatttactgtgaaatctggacaaaacatctgtcattatgtaagccatggaagaaatgttgagattagcatgcagtaatgaacatggtagtaaatgctggggaaggcagaaatcagaagagacgtaaataagtcctaagttttaggccctcaaaaggttaatttggattttcgttctgggtgtcttcatatcagagagacttggccaatctgatataaaaaaaaaatcggaggtcaacagaagtgattaagcagctaggaaaattaactcagaaagaagatcttagtatataatttggaaaaaggatttgaatctctcaaaacccagagaaacagaaggataatttagaatgctttgtagagcggtagagctgatggcataaaatgaagcagaaaaaaatactgagtgtaagacagttcttaatagacagacaaagaaccatatagcattccaaagaaggtagtaaagttgttttgatagaatctgacaccccaaagacagacaagcgctaacatttattgagtacttacaatgtatctggtactctgtatgcataatttcatttaatcttgcagtaatctgtgaagtaggtactaatacaatcttcactttacaaatgaggacactgaggcttggtcacatgaggctggtaggagatagtgccgtattttgaactcttgttctagagttcagtccacatcactatactctcctgccttctagtcatgaagttgggtctcagtaggtgtgttgtgtagaggtttgacagaataacccagctggttttccaaatgctgaataggtgattctaacaagccattttaattaagttaaaaaaaaaactcttatgtattccaatcaaaagtgtactttttgttcagtcttctggatgaatgaatccttgcagaaacaagatttgtatatgaaaaagcattcttaatgcagatttaaaataaacaggtattaggctcctggacccgatagagtgagcagcatcccgcaagtgccagccttgcaggaggttttatctgctggaaaattggctgcatggtagtgtataggggattggagagagaggcttgggtcgaaattcctgatctgcctttcatttgcttattacctcaagtaagtcacctaacccctctggaagtaacaacactgcttatgtcatggagtagagaatctgacatgatagcgtatatgtaaaggtagcctgcacatatgcaaattagatagtatgcatgtaaagatggcaagtagataagataacatgtatataaaaatagtatgtatgtttttatatgtaaaatgtttagctcagtgcctgacacataatgaatatttgattaatagtagctggcattattattatttattatccagatacaatcttcaagtaagtactttagaaagtatagcccggtggtaagttttaaaaaagattctaattttatacagtcctctcagataacatatttgatagtaaaatttcaccctctgtgtacccttttcacaatttgggagtttaccgaatgctttggtgttttaaaggcagtcgtttgttcactgaaaatgcagcttatgacaaattcaatggttgccaagctctaatatgttagcaggcagaagcatgcttttaatattcatcatctttaagtgctaccaactgacatttagtactaaatgtgcagatatgggtgctgagcaaaacagagctaggaagaggacttgctaatttgtattctagatggaaatcttaaattagtttctgagatttttaaatggatttttaaatgctgggcacataggaaattgagttcatattaatatttataaggtttgagaagatatttagtgaaatatttgtataatttaattttggtcataatcaagtagtaaaccataacaagaaggacattgtactttagtctggtggctgttttgtgacttaggaatatccttctggaaaagccctgaatgacacacatacacatacatacatgcttcaaaagttcttctttattagaacccagaaaccagaggttatttatatataaataccttgggttggattgttttgtgttaattttaagttaattaatttagaaatcagtgttgataatgatttctttaaaagcatttattgacagttctgcagaactctataatctagctgcttttatattctttattatacagaacagctccgttggttcatagaatacctgcttcctgtagttttgcttagggctaattgagtttaatgtagttttgtgtgcagaaggtattgacttgtgcatagtatttaatttgtgtaaatatgtgtgtatgtaatgttttgcccctctgagttttattttaaatgtaacccttgaaactgggataatagaaattcttagcctaggcctgctagcaattgcaggtgccaacggtttaaactgctgtagaaatacaattatgagcagccaagagcaaatcttgttttaaggtccatgtgtaatgaatgcctgttagtatcatagaatacaattaaaaagaggtttacctctcctaagctgtgattggttctttctgatggaagtgtagagtcccatgagtggactgtgtattcagctcttggtgatttagactccagtgagcctggcattctgcaggcttggataaattcagggcagttatagtcaggcagagatgagaaaagactgaaagattaatgagggagcttaaaacaaagcttcaaaaatgagagcaacacactgcttggtcttatgtaattgtgccgagtagaagtcagtcttggctgctgttgtttaaaaattttaagaggttggcagaaaatatttgttataaaaattgtatcttgagaataatagtgaaaacctaggacataagatctaattcttggttgcttgtgtatgccctccaagacacacccttctcttcatcctgcttttattgcagtttgaccaagcaccctgctttcctgctgccccccaccacttctttttggcaaggacccttattgatgactgatgtccaagccctggctgcctccaggagatgcacgtctgggacgtgctcctagagttcacgttgatgctctctcactacaaggcctgaaagatcgggagcatatagaggtgtgagagccctctggggagataatctaagggattgttggtgacctatggccatttctggttgatggttttaaatagcagttggttaacatttcttctatagaacttaagggatgctaatggctttaaaatgctattttgcctttgaaaatcctcttaatagatgctctaacgaaccttccatttacgtgataggcacggttgagctctgcagtgaagctgttcatactgttaatgtgaagctgggcacttaaaggggaaaaagcagctcataaataacgtggcgcaggtgaatcacttctgaaatctagagcttgccaataccagtgaagaagagctgccttggaggagaaattgccaactctcaagcaaattcttcagcgcttcaatctagacacacaccagccttttaactttgctttctgtttcctcttcaaggagtttgtcgccacctacaggaaacaggaagcacaataacccactcagtctctgagtgacacctggtttcttccattggtcattcctcatcgcagtttttatacattttatcacttgttcatcatatagtatttatcaagcttttttcttggctatggaatgaggctaaggtctatggaagaaaaggttctatctgcactagctgtttggcaggagattcctcacccttaattgctttttaaggtctctgtctgtttctgctgtcatgtaccttttccacgaacacaccaacaagagagaacagacttaccgattggggctctgtagtatatagcatgtaaaagtactagtgctgacttactcacaattttgccttcttttgtttgttggagagagcatggcaccaaaatcatcatttttattgttgatgttgttgattttgttttcttttgccttatttagagaaaaatgttaggtagttaaaaacctacatagcaaagaaagttcaagatgcatgatgcagttcagagaagtctaaaggaagacatgtgattacttttacgggtacattaagggtgttgaagagataattagaatcaattattttcattcattagcatctcataactatatcactgagttaagttgttccccattgtttgaaacaagagtgagttggcttgaaaggagttaagaagaatgcagggtttttctccttcatatatgaatgcctgtggctctttctttttcccacagcatctttaacccagatcctctcctgaactccttctgggttctttgtatggctatctgcttctcctggaacagcaacttaacatatcctagaccaagtccattgtggcccaaattagattgatcccacttttttttttttcctttttcgtatctctcctcttaaaagagcagcagaaaccactgccacataatgaatcctccttcagaatatttacgttttgttttgttctccttttcctcctccctcttcctttgggcaagcgatactataatcatccactgtcctaggaaataattcttagttatctttctcagttcaacacctctctactactaagtccaaataagttgctttacctttgtaacgtttcgtgaacttccttcatctgaaactgaatctgtgctttattcttcttaccatcatttcatcatcttgaattttctgtaactcaacctcttccgcatcatttagctccagaaattcttactagttgacttttagtagatttgggaaatgggctgttggctagaaagagctatctaatcaagtgaaatttcacccatctactttccctgcaccccacttccatgtttatgctgtggaatttcaagactggttttagatattatcttagagtttttatttaaacatcaaaagtaacttagggtaagaaaatacatcagtggcttgttgggaaatgtcacacagtgctggaagattatagatacaatattttatatatttctaccgaatagttgactaaaagttgctcaaaattataatacatttatctaaagaagataaacacatcatcaataagcatgaaaagatgttcaatgccattagtcactagagaaatgcaaatcaaaaccacagtgaagtaccacttcagacccagtaggatagctagaatttaacaagaagacaataacaggtgttgacaaggatatggagaaactggagctcttatatgttgctagtggtaatgtaaaatggtgcagccaatttggaaacagcttgacagttcctcaaagtgtcaagcatagagttaccaatatgacacaacagttacactcctagttatatacccaggagaattaaaacgtgtctgtgcaaaacatgtacatgaatattatattattatttataatgtaatgcattatattattaagcagggatgattcataatcaaaaaaatggaaacaatatccaatatccatttattgatgaacaaacaatatgtggtatagccaaataacagaatattacgcaaccattaaacagaatgaagtactgatacattctatgacatggatgagccttgaaaacattatgctaagtggaagaagcccaaaggccacatattttatgatttcatttatgtgaaatctccagaaaagtcaaaagctatagagacaaaaagtagattagtggttgccacgggttgggataagaggcgaaccagaagtgactatcagtggatataaagtttctttttgggatgaagagaatgttctgaaattagatagtagtgatagttgcacaactctatgaatatattcaaagtcattgaactgtacactataaacaggtgagttctgtgatatatgaattatatctccataaaagtgttatatatacttgacataagactatatctaatgaagtcattggcagctgtatatgcttaacagcctgcgtcagattcatttttgtgtcttccaaaatgctaaacacaatgccttgcatatgtaagcctttgataaatggttgaagaatgaatgagtggatgattgaacaaacaaattcacgagtggtcttgttacagtgtgtggaaggattgtttttggcaagtgctacaggagagaggtaaagaacaatggccacgaattgaagcttctgtcctcctgttcacttaggctgacagttcagctgtcctgtcattgatctgatgtcagtctgatagaatcattctgtgctttgacgccagctagatggtatatttcttttttcttttgagtgataggttggcaaaatgtactttagcgactgtatgttatgtggatgatgcatgatgccagtgctctgttgtgacctttatttttatgagctgtgagaattaagaacctaccagttttagtttaattaagcagtaagacacagcagatggtgcatttgtgggtgatgattgcattccactggtttcctcaagcagcactctaaccctatggaatgctttgcctggagtatcacgccactgttgcaaaattaccaggaagacaaacacattgtaataatgtagtcagaaaatcttggaggacagtttagaaaaggacctgaactccacaggagttttagtagttagcagctactggaactaggatattaaggagaggaatccatgacataacggctgtagccatttactacccatctttactttccaatatttgcaaataaagtatatgaagatttttattaccctagtattctttcgtgtaatctgggtcaaacattaaaaatgcattggaatatgatttgcatgtattaaagtgctcagagaagtttcagtaaatggagaaatactgaattgatgtcaggttgttttattatgtttgcttttagtcactacagagggcctagagtgtcctacaaaatgcatttttccccaagtactgtgcacttaccactagcatatttactccataggatgttgaaaacatacctaagcagagataatatagagttaatccagtacttcttaccaatcttgcaactctttaggaagaaaaccaaattggtaagtagaattactttcattgttaagggatagactgcctaggtcagattcttttccctttactatctttgaaaaactgaattacttgaaggctggcataaaacttacaattgcacaatattttagaacctaagataatatgcctcaatttttctcattaatgcaatatatgaaatcatcaaaatgaaatacattcacttactggctgtaatgttgttaaaagtatgaactatgtggattttacaaaatatagcaatggttgctttagatagaataattatttatctcatgtctttgctacaaaggaagactagatttggaattctagtaaaataatgaaattcaaaaataatattttaacaggagaatataaattctctttggaaaaacccacattttatattgatttttcccctatattacataaggaatctctttccttctatttttaggggtattttcatcacaaaaacatgtgactacatcatccttctgcttggagacctgacttatatttaattaaatgaaactttttttttttctggattcccaccaacttcaggatactcaagcattgaagataaaactgtaggtctaaacactaattctgcaattcttcttgtaggaataaaacattattaaccttttagttaatactggtttataatacagtatagggaaatactataaacacctatctgcataggaaattcaaaataataactgattttatcctataaattattcaagattctgacacaagaaattgcaaattttatttatatggaaacatgctttactgcaaaatcattggtatttcatttctttatagaactagattttcatctaattaaaatttagaaaagtgctcatcatggtagctcacatctgtaatcccagcactttgggatgccaagacgggaggattgcttgagcccaggagttccagaccagcctggacaacatagagagacctcgtctctataaaaaataattttaaggaaattagtcagccatggtggcatgtactcccagctgctcgggagcctgaggtgagaggatcgcctgaggccaggattttaggctgcagtgagctatgatcgcactactgcactccggcctgggtgacagagcgagatactgtctctaaaaaatacatgaatgaatgaataaataaataaagtttagaaaagatggaactagattgtttcccgtttactcagcatataggtaacttgccgatttttttgtagctctgtttaataaaaatacactacagaatctccaaataaggccccaacaggaagataaaattatgtttgataattttagggttgttaggattatttattttagttctctaaaattggtaagatgttaattcttcatcatctacatggtttatctaatggcaataccttttttgaatgatgcattttttgcattatttttgtattagaggaagtaacaacatctgtcaggatgtacataaaccaataattgacaatctgtacctatagcctcaattgctcccttgagcagtctggccctttttgttaagatcatagaatttagaatcaaagaactgccttcagtttctgactacgtgacttattagccgtgtgactgtttattttaggagtactttttggctcccaaagaattggcagggtacctatataatgagtaaatgggaatataattctacctgcaaaatcaccaaaatagtgatttaaataatgttttttaaaacattatttaaagtagaaagaagtggagagatgggcaatccagggcacgtatggtgcttccacaaaaatcttgaattcagccttcttttttctgcttcaccatcctcagttggtgacttttttactgatggtcatctcatggtccaagatggagtttttgccagtgctgctgcctgttaggcagcaggaaagacaaagaagagctgcttttggcacaaccagtttcttttccaacccacgcaacacttcctcttaaagctcatgacctagatgtgagggaggtaggaaatgttatctttaccaggcacagcttaaaaagaggggttctgttaccaaggacagaaagaagaatggatgtttgtgaggcaactagcattctctgccatagtgaccttggatcctttcatctcattgagcctcagcattcttgtctataaaaaatggttgtaaaaacaggatctaattcaagatcctattgttttgagtatcaagtgagttaatgcatataatgcattaagcacagtgtctggcatataagtaagcaataaatgttaattattattcttgctacttccttaatatctctaggttaatgtcctatagatacttaaaatgcttatgtgtattacagatccttactgcattacctagctcaccacctacctattccaacaggctggaaacctcagagcaatctttgagtatgtctttattgctgtctgtacctaaaagtcatcaagtataattctgcctgcaaaattcttcatggatttctcaaacttgtccctccatttccattcccgtatctgaattcaagccgtcatctttccttgccttctacccgtcttcactatctacaagatcacatccaaactccttagaatagtattcatgtcttcatgtagtctgattgaagtattaaaagcttaatcttgattccgccacatctccctagtctccagatcacacacttcttgtactctaacttcactgaaaattcactattccccaaataggacattatgactctagtttcatcttcagggtaaatttttacgaattttcaagttgaaacttgaggaaactaagcatagatgtgtttcagcctataattttgaacattaggatgtgatttctggaaactcctttgtgattttatttatgaggccaacagatggacaggtattccagtatttcttatcatagctgagtatctaaatgtatgaatatgaaagaacgaagggcttttaagtaaaaggaatggatggaagggaattgatgcatttctaatggatgggttagtttgttcagcagttctgaaagtataggtttagatatagagactcattatttttactttgctagacagtagcattagtttaggtacttaatgtgaatgttatgtacgcattttgctttcaaattaaaaaaaataagtagggaaggttagctttacttttattgtgtgtgtgtgtgtgtgtgtgtgtgtgtgtagtgtgtaataggatgtataatgtaatttcaaagccctctgatgcaatattttgaaactaagttggtagtacaattaaaacatatctttggtcatagattacttggccttatgccattttcataggcaatgtcctacttatatagcctggattggctgagaaaaataattgctgctatgaaataattttgcaattaccactgtaattaagggcagtttgttaatgaaagtgcttggtgaataatgactgcagggcactccatcttgcagcttcatgccagatgattggttcatgtggtggaggtagttagggaattagtgacacagctgtcatggttacaggatggatgtaaatatcctttgcagttgatgatgaagaacagtcattagcctcctgccccttgggaactggtcagaggaacaaaaataaacttaacacgtgatggtaaaagccattccttatgtctccttttcttcagtatgaacaattaacgttctaatagaagctgcagagagcatgtggatgaaccctctccactttacaggcgtgttagtgtgataaatgttccttcgtgtagggcattggttgttcacagtttataaccactcttattagcttataggccagttaaaaactgctctttagagacccacaggccctatttaaatttttcgtgttcatctccaggtgttgtgtattcagtttgaccctttaaagactgtccacggttggatttttgcatgctgtctgcaaggctgcaggggcaattgaagatcaattttctgtatctgggcttacttgcttgtgtaaaatatatattgttatgaagaagacctagatgcttatctgatcctcctttatagtttttaaaagtcattgaaggttgaggagccgttttttccgccttcttaaaataaatgtcctaggtgtttaagtgtgcttcgtatttatattcattccacttccttggtgttttgatgttgtttttcattgtaaatttgcttaagcaatcttttgtggagtaatttcataacatgcacacactgtggttttacattgagttgctcgtgatctgcaattcattaacttttgctgactaggaagtcagtatagcacgttgcattttctctcactttatcttgctatatagtcagttttattccttgtaaaagatgttagtagaacacttccttaagatggcttctcttgctgtctcatatgctaaatcttttcctctggtccaagtcttctcagggccttaaggagagatttttggcatttgtatcattgcattagaggtgaccagatagcgtcactaaaggaacataacagttttctgggttttagctcaaaatgactattcacggtaacactatacattttaaggatgaatttattgctgcttgtgtctggataagattctttgcatttgctgctacttttgtgcccatgtctcctcttggctttagcaagaggaggtgccaaatggaaggatcggaattccgcctcggaactatcacacactgtagcccaaacctctgcctcttccttttctattctttggccattgtggaaagaatgaaaactatcaacaagctgaacaaggtgaacagagccttgttcagatgtttaaatgcctcctttgcaactgagttactcactctcccaagatgaacttttctcattagacatagctaactcactgtggagatgtttctagctgacttgattgtgatcagacattataggatgcaaggtaattgctgaccctaaatagtaggggtgagtcccccaaagccaaataacttgaaaaaccttacatactgagcattttaaaaaatgtgtgtatcttagtccagtaaatgacaaaatcctttggaaaatgggcattattctcaggcatgttcatggctggccaaattatttgggttttggtgggatatgactctctggagactcttcgcaggatgcctgtctacaggaggagctggaatgctccatattaaaccaacaccgggaagcaagaggagagaagcatgcagaaaacaccctcccagttgaatgaaaattgcactgtattatgacttattccctttttagcaaaagtatgggctttgtggtaggtcaagataactaaaatgggaaagaaagaaacaattgtgtttttaattcgtgttgctccaggtagtgggactgagaaacttttcctctttttcaggagagttgtgacacgctatagtatttagatactcagtttgtgttcccatttttgttttgtttggtggtgttttgattattccattttttttttttttggctaaacatatgtgatgtgtgtttaattgaatttccaaggcaacgatacaggcacctgtcaaaaagtatatttaaagatacactgcaggttttcaggagaggtggccatgtgaatttaacaatctgcaatgagaggggaaaaaaaagtttctgagtttgtataagtagttgagattcccaagtaaaacagaatctgttctcatgcagttttctgggctagtttggacaggagctggaatctcatttttatacattaacaactcttgttggatttctctcatttcttcaggacaagtcaaaaactttgtagttctccacaatgaaaatgtgtcgtgtcccatcctgtccttttgccatcttttctatcaaagaaacactaattataaaaattgaacataaatttgtactgtttaataggtttgggtttaattttgcctcagtgggaagacgtttccattaaaagagtccttttttttctcttcctccctcctttttcttttggtagaacagttagtaaaggcgtaggaaattgattttagtgtcacaaaggacatttctgacagggatgtactttgaaatgattcaaagcatctgtttctcttgcatatgcctagcactgctgagagctgtacctagattaaactgtttaacgtgtcaactccaaatccgatcacaatttacatcccagttgcttggttggaatttttaacatttcatgaactttctcccctaatttatgaaacaagcttctgctgaaagtgaccatttgttctagatgccaatatgtcacagtcaaaattgacttagcttgagaagttatttgtttttgtatggtcattttgcctatgaaacaaaatcatctttgcagtttttattcctgctggcagggtttgtgaatgaacgcttggtgggtgtttttgttaccatttgccttccactggtgctatgtctgtcatacaagctggctcagagaattccagttttaagagtgtctgagcacagaaattatgggcactctgtttactaccatatccatgacatccagcatagtaccttggaaagccacctaaaataaatctttcatatacaaacgaggaatgagcactttctacatagtcatactgcatagtcttagtcatagactcttgattctgagggctcacttatctactctgcttatgtttctcagaaattagtaaggctcacttgtattacttatagtgaagcatgtcctttgaagttgaagggcaggggcaattattttatgcgtgtgaactttttatattcatagaagaaataatttactggggatgagaagaaaaggcaaccatgttgatgcataatagggacccgagctcattaacttaattgtttagtggctcctgactgttcttctctcccccagtgtccccccatgtgccctttcacagtatttccccatgagctttgagtgaagaatcctgagaagggcttctactcttgcctttccctctgctaataccgagcatagtggtggcgtttgtacaggtgtttcctggggtactagttccccagtggactcacttgttgaccttgaagatgcatggtcactcatgactagtcagttgagaacattatccataatattgttatcaatatcttgcatctctatcagcagttctctgggattgtgttagtgaggatagagagcttcacatttacaatagcttgaatgtttggaaattttcttaccttcactcactagtctagggtgggtggtccagatctatggatgggttggcttcatctagttgttcagtgacctaagttaatggcagctctgccaccttttgcatgtcactctggaggcactctggtgttactgtttcagcttcccagaaggaggaaggagaaagtacaggaggagcaacctcaggcactaggctggaaatggcacacatcaattctgcccacatggaaaagaacttagtcgcctggctgaccccgcttcagggaagaccaggaaatgcagaggagcaggccagccttgtgccaggctgcatggaagaagaggaaaatggatttagtggacagttagcagtctcttggaccttaggtttttcccagtcagttagctgtccagcagctttatattgtaaagctagttgatcttagactttaaataatatctagtactatctatgataatttcccccctttaggtttctttgggtccaagctatttataaattgtactaactggcagagcattcagcttaccttcttctggttaatgtcaaggactcagtagtttgcacagacatatttttaccctttgaagtgataaattaacatttgaatggttgcttcatttccttccacttttttatgtctgggacacatggtagaatagggacatttttgtagatttgtgatttcttcttcatttgggaagatattgtatgtactactggtatgctagtcattcactgtataggaaaacccagaaggcataatcactgttgtctgcaaatattattatatagtatatgctgatggtcactgcctaatgtaaaattaggtttcccttcaggatctttgtttagaagcaattcttgaggtgacatgagaaattgttgccaatattattgcttgctgcttttctagttttttttttctccaaggatctaaaaaatcatttacagcatactttcctctgctttgattagattttagaaacattgtctgattttctgctcacattgtttagagaaattatactcccagccatctcttggctgctttagggtgaaatatatcaaaatctttggacattttaacctgtggttagactggctttagtctcttctgctacgttcccacaaacaaagggttgtcagagttcttgctatgcaatatattctatttttaaggtaggatttagattattagtcatctgatgttttaggtgttagcacaactagacacttaattttggttttgtgccaatacaaatcacctggagttttatttttggtaaggtggggacaagaaatcaatcaagtgtgttctaagctctttgttttatgtagaatgtaattttattttaaatatactcttccttgatatatcttgttgctctaatattgatacggcatgaagtagaagtaggtgtttttcctgagtatgatttactataagtcctgtgatttcagctatattgaggctactactaatggattagtacattccagcagtgtatttatttagcatcctaccctccggtaatcaaaacatgagatgcttcagtgtagaattgcttgctagaggtgatggagagaaaacacacctctctagtggtgatattagtctgttttaactgtcttgtgaatgtgcttaatgtctagggcatgttaaattgagttatccaaaaatagagtccctgaaatttaaataaagcggcattggagcaagaaactaatcattctttttctggtagttaaccaattgccacctttcccggctcacttattatagcagctcctatggctgtcactacactgtcacattgttctgtaatactctgtttacatttctctcttctgtaccagactgtgagcttcttgtaggacgggaatgtgttgtattcatgttcatggaactcctagtcactaaatagttgatgaacaaattaaaagatgaagaaacatattaaatacattgagtaggaaaatcttatccttgtgccgataggtgaaaactaatctgatgacattcctttaaagtttggacaaataagttggtattggtgatttctggatatagggaatctttttgttgcccatcactgctcatctgattaatcttagttttcttaaaaatcaagaaaacatacagataccatgtatattggtctaaaatgataaaaatgataacatgaaaaagagagttttcctcactgaggtgtctctgactttctgcaagctccatgcccactctcagcctgttttcccatctgtcaaactgggggcataatgggacttagctttttgggactgttgggaggcctgaatgagatatatttgacccttgaacaacatgtgtttgaactgcgtgggtccatttatacctggatttttttcaatcaaacatgaatggcaaatatagtatttacgggatatgaaacccacggtctacactaggggcagattttcctatcctcacattctgcaggaccaatggcaggacttgaatatgcatggattttggtatatgcagaggtcctggaactgaacccctgatgatccccgagggatgattatattttgtggagtgcttagcccagtgcctcacaccatagtaagctcccaacaaatgttagtcatgacaatcatgaggatcgttgtagattttttcatttcctgagacgtcttccatgattattaaatcttttaaaaatttttattacctatttgttgttgttttacttgattttactgttaaatagttcatttcgacagaaatcgtcaaatagtgtctttcattaccatgactagaactcagggaaagttaggatagctatctacagtcatggaaaacaggagataataagataatctttctctctctttgtagggatatcatatcacgaagtagttgaactatgtaaagtagtacttgtttgtttatccagcatgtaatgcctgtaacaacaaatagaatctcctggtatcagatggttctgaaagcttgcacaaaacactgaaatgataagatgccacagacttttatgttacccacaaatattactcttcttttttcttcattttaaagtgtgtatttctgggtcagacactgaaatgtatttaagcatttctctgctaaccttttattgaagcaggtatttgttttctattctttctaagatctagtgatgaggtgcagtgccacctcacttatctggaggccatgtatcagataacctcagctacctggaacacagctgcggcttaggagtaaaccagaaaggcctccagctgccataggtgtcacacagtctttgcattaaggcctatgcacactactcaaagaaaagccccggggtttcaccgacagcaaatctgtcttaattttacaatcctgtagaacttgttcaaaatcttatctgtctttgttatcttttctccacccccccatacatacatgggaactagaaaatttgaggtttgagaggtacagagttggggggtgctgctagatacaagtaggctcaagtagcatgaagaattccttgataacacttagcaggatgcaagtgttgacttgagtcagcaataatggtaaaattattatttttttcactctgtttaagaaggcaggtactctattaacttctggaatattttcatcaatataatttaattaaaaactgtcatgatgattccagataaattggacatttccattttctctgttatttctggctatttatgaagttttataggcataaccttgaccttttacttatgaatatgtttcctttacttgcctttccccatcgtgcatatatgattctttcttacctttatttttttcccatcgaaggaataaaaataaacatttaggtaatagagaaacttaacaagtcttgaatagtacatttgccaaagttggtatttttagtttgtaccatgccattctgcattaactaccccatctcaaatactaaagaacaacagtaaacccagctgtgtcagcatctgctttccctccatgactggatttctaagcatgaggctagggattattctcgagtatcagtagaatttagcaccatgctatgcacatagaaagtgctcagtaattctcacagcaacagttatttgagatagatattgttgttatccccatttataggtgaggatgtggaggttcacagagattgagtgacttgccttaagtcacacggccgggggatagaaccggaactaacatctcacggctggccctttagtccatgtgtctgactgtcctagatgcaaacctcactgcttagcttcaagaaaagctcggcatttctggatttcccatttcagttctacataacataaaaacagatacgtgtttcctaactgacaaaaagtaaaagaaaaacaaaggactgattgaaatccgttattaaacttctttgaatgattgaattggcataaatacctagctcaaagaaaatgaaccgttttaaaagcagtaatatttcacgatacttttttccccaattcacctattcttttcatttttactttgacagcattcttggcttgtatattaaaaagcccatgggttaaagctaatcttatatgtttaaaattatgcattgacaatctttcttttggttttccttttctaaacttttttggagcgttgacaactttaaaagaaatggcatgtttctttaaccttaagaacattttatttaaatttagtcactggtttggagaaagaataaacagaacttttcatttaaatgttctcatatcttggaagaatgaatgggtagtgatatgatttatagcttgtataagaataaagaatataaaagaaaattgaaaccccaaattattggtttcagcagagcatttctgacttaattctaaattgtgaataccatttacatcttgcttaaatgtttcttgccagtttgtagaagcaaatctctaccttttgtgtaacacatagtttaactgaatactcattgtctatatagataatttaaaattaagagaggtaaatcatcattcatatctagcatagtgcttcaataaatatttgttgattgaataaatgaataaaataaggaaggaaagggagggatggaaggaagggagggagggagggaggaaggatgaagggagggagggaaggagggaaagagggaaaggaaaggaaaggaaaaagggagggagggaaggaaggaaaaaagtaaaagattgctgtgttactattatactgtgtgtaacaggaatagcactcacactctacagaaaagttgttggtaccatagatatctatacctttctacgagaaaactaaaatgtgaaaaataggttactttgtgaaaaaaatcactctaacactactgttttgcagacgtgccatatcacagatcagctttgcatgaaatggaaattatcttgcattgtcttcatttaaagtttttctagtatatttattgagtaaaaagacagataaagaattaacagtggttacaatttctgtatatatgaagcatctaccactgcctttgacttaaccctttttatgtctgagcttcaatcatgaggttttcaaaaattatttctagaaagcaagttgggtttcttcaatagacagtggagtgttttgctccagagtactgaaatattctgttgtgatgttggaaactttcaccaattaaggacaaaaaccttctcataggtgtgtatatatatatatatatacacacctatgagtgatatacacacacacacacacacacacacacacacacacagagagagagtttgtgtcttttacaggaatcattttaggagttcatgtagacttattttattgaggctgttgagcaaaaattttttttctacttctccttgtgaattttatttgggtattatttgaatagtctcagaagtagcagatctttattttttaggataatttatttggaatcagcccaaagttatttggaatcatgctgttaaggtggacactgaagttgtggattttaaaaaagaaagcccagttgtagctatcaaacactagggtataggtgtgacacattgattgtcatagaaggaaaggatataaggagtagttgaaaatatgcaggaccaatgacagtaatgttggaataaacatatgacccttcaaggcaactattgtgaaaggtaatcctctcttaaaattttaaatctataaattccagtgatttttcttcaaagttttaaagtctcaccttacatagactcaaagactgatgtgcaacagcaggacaagaagaacctgaatacttaggatctagttaatcctaaagacctgaagcaacataaagatcactgtcaaccttggcattagcctattttagtaattgggtctcagcatatatatatatatatattttttttttcctggcttaaatagttgaaaattcatttaaaaatgttcttctgatttttaaattttgtatttatattttttgtcttcttgtctcataggaaacagggtaactgcatttttggtgttcttgctgagagaggataggtccctttgaggaacatgttttctgatttgcaagatctggatacctgggacatttaaacttttcaagttactttttgcaaaggaaaattgctaaaaattatttgggctcttgtaattgtaaatgctgattaccaagtatagccaacacttacttttaaatgggttaggggcatatctataacaactatctctgcaatgtggaaacttaagtttgccctcaaatatggaaatccagataagtagaaatgaaagcatttaaatatatgttataaatatcatgtgcatttgattggcctgaaatactgtaactatttgaatgctattgcatgatgccagctctctctttgacattctgactacatcactcactcactccatgctaccctgcatggaatattgatggacaacttaaatccttctcaatttgaaagtgaagcatgggtaattaagcaatgcatccataagttggatatcgagtttttactgaggcccagtaatgaatagaaagtgcattaaccaaattaaaactgttgcatgtctatatgtttggacattgacatgtctgtgaatttcattactggatagtgaagtcatgcttatcaaagagctttccagaaatttcccttgtattaaagctttggttaacttctaagtttagtcaggggagataattctgtgacacttcatcttgcttactaattttaagagtagtcctacacaatcctacttgttaatgacccggaagtctaagacatagaaaacaaggcctttctcttataccacgttcagtactagataaatgttatcccagattctgttctgtaccaatgactatgaaaaattttagaagaattctgttatatctatgtctttaatatagaactgctagaagtgagtagatgaccattaatcttagtaggtgatgtagtcatgcattgcttaacaacagggatacattctaagaaatgtgttgttaggcaattttgtcattgtgtgaacatcactgagtctatttacataaacatagatggtgtagtctactacactcctaggctttatagtatggcctattgctcctacgctacaaacctgtacgcatgttactgcactgaatactgtaatcaattgtaacacaatggtgtttgtgtatctaaacatatctaaacatagaaaaggtacactaaaaatacagtattataatcttatgggaccactatcctgtatgcagtccatcattgaccaaaacattgttatatggcacatgacggtatgtgtgtgtgtgtgtgtgtgtgtgtgtgtgtgtgtgtgtgtgtggtatatatcctctgcaaatatcccttaattaaaattttgaagtttagtaatgcttattgctgaaagtggtttgatatataggaaaatgtgtaggaattctatataatcaaaattatatattatagtgcctgaaagtttacatggcatattctttttttttttttttttttttgagatggagtctcgctctgtagcccaggctggcatattctttttacactgtagcagaatttgatcagaactaaatatcctgaaacgaatgactggctggtctgtttctagctctaacatgagtcactaataaagtattttggtgcttcacctttttgaatgccttagaattctaaggctgttgcccatcctaaaaaaatctcaagtcaagatactagttccctattagctgcagaaaacacagaggggaggagggagctagtgctggtagaagaaactggattttaacagaactttaaagaatgcctctttcattgtggccagccaatgctctatttatcccttatctcattgtgctgtggctctccaagctagagaggagagaaaagattgagaatcaaggtgcagagaataagcagtagagaccaaaaggacaaaaaagcaaaaactgactagaggaagcagaggactgaaaacacagaaaaggagaggaatttcaaagacagaattggatagatacatattaaaaccagtgagagaggaaagtgctttctgataatgcgaactgggttgaggtctgtgtatataatcagatacttgtctgagctggaaggcgcccgtaggcaggagtccagataatcttgtggccttctgggtgttgcatggcaggtgaggctagaatctaatttttttctatctcaacatcatctcatattaagcacttgtcaagctttgatttgagggctccgggtgatttggatttcggtgttatctctcagaagttggtttccccacttagttgagtgagttctcatttcaccatctgtgagcttctatgtctcctgtctaggtgtctatttcgtgcatggttgagacagtctgtgcagtcttgaattgtacttgtgactaagaggagtagtcataatttaccattcatttctgtcagagatggacagttgataggtttttgccattgtttacataatgattccatacagccataagcaaaaaggcagtgacctcatattacctggtaatttaactactccaaaatcaaggacaaaaactgtctgacaataggcacttaataaaagtgaagcttgtcatttgtttcctttttttaatttgagttgtgaatttaacatttgttatgttattaatatttataagcgtatgtaacagggttttatcttacacaattttaattctttgtatacctgtttgtggtatgatatccaatcagattattgctttgataattctaagatgaaatgcatagggagtaaatgtgtcatttttagcacaatatctctatttaagttttctttgaagccaggaagtttggacataagctgtttattatgccatagttatatctcttcctaaagaaaaccaccattgaattaacttttgcatggtgtttttctatcaaagcatttgatccttgtttctgcaagataatcctaagaactttttattttgagaatagaagaccatgatggatttaattcataacggggagctgctgcaaggaatgtaaatgtaagcgcttgataaggtaggatttcctagttgctatggcaacctttgggtcatgagcctgagaaaatataaagtaagtcctgaagctgtgaagatgattataaaatttaactgtcattcttcatttagagttgatggcaaacattatttacttaagtttatctcaaggcaggcaaagatccattttttaaaatctgagactcagatcacaaatgaatccatgttgcacatgtctaacattataaagcacatgcagcatttattattctaaccagactatttgtacataatatccctgtagatttggtcactttcctatagaagccaacagttttcatctcttgaattcttaatgaaaactgtagaatgcagctgtatacactgaataattttgcaaaaatgtatgtgctttccatgccaaaaagaaggcctaggggattgtataggaaggaggcctttgtgccttcttttcaggttcaaatataaatggtaaactatttagggtggacaagcgccaggatatgaatacagttgtatattctcaaaatatatcacaacctggagattaaagaggtaggttagaatctctttcactaatgcttcccatctcccggtagggcacagggttgtggggagggggagtaaaatctgcttcttctccgaggaaagagtagatttggggtgtcaagttcctaaattgagatgtgacgtttacctgtacactatgacaaagtgccagtttttcttgctttatcttttacagaatgctgttagtttgcactaatgacctatgagacccatgcaaattacacaatcttgcaaattagtgagtatgtgaacaaacactataaaactatcagatacagaatcaaataaatgtagtttattgcaggaagaaaaatagacttgcatatggagaaggaatgcattttcacaaccagataagtgctttcctgttgtctgcttgcccaccggggagcgtcaacacattatatgatctgtggcagccaatgacttactggctcttgggcaaaaacatcattttttcaaatgcaggcatagaaaatctcagtgattacatgcatactggaatctggtattgaattgtttcccttatactttgcctccttaaaagtattcccctttccagcttcatatgctgaacgtttacactagaaaggaggacaggatttaaggttattaagaagagaatgtatacttggctggcttttttgtaccacacccatctgaacctgggagattatttgttgccccccttttgggggatgaggtagaatccagcccacacacccagcagcatacactctgctcatcaaagcacttttctcagttggtttgttttcatgtctagcagcagaaatagctgctctttttctttccttttttcttctggcatcttgtaattgcaactggtaatgtgtcttcttcctaacctggaagcagcacagagatggcaacattgctccactcatacacagccttactcctggctataatccaatgctgccaccgttgggtcaccaatggtgacccagtgcatcaccctttgtctatcactccatctcccttcattgagaacctttcctgggccaaccagttgcctcctttatttttgtcaccctggttacctatattctatcaggtttgctaatgacaataaccccagtagcaaaaactatatcaataatgaacattttctttttttctttttttaggtaagaaaatgagcatttatttagaatgagaaaataaataacaacaaagtacaaactttacaaagctaacacatactataaacttcacaaaatctagaaaatataatggtttgaattgcctgatatgactccataatacctttcccactgtattttcgtaggaaaaatctggaaaactcccatcaagtttctttgatatatcagtttaaaaaatgcacttgctatttgtaggtttattataggtttggggttacaaacatgggaatctgagaaattctatttcacataatgactataagaaacatttctgtttttctgaactttaaattcaggaatacatgtgcaggtttgttacataggaagacttgtgtaaagggggtttgttgtacaaattatttcatcaccccagtattaagcctaatactcattagtcatttttcctgatacgctccctccttccacccttccccctccaataggccccggtgtgtgtggttcccctctatgtgtccgtgtgtagtaatgaacattttcaaattaggtactaggcaccgtggtaatgtgtttgtatgtgtgtgtgtgtctgcgtttactgaatgctttacctgatatcatttttacatgtacatatatattttcatttcattttcaaaattatacagtaacattttattttgtgtatgtatagttctgaagttttaagaaatatatatgttctcaagacacagaacaattctgtcacaacaaaaaacttcctcatgatctgtgataagcattttgagtgcattgctatttaattcttataatgttatggggtgtgtactgttatctcttttttactgttttatttttaatttctgttgaggaaggtgagacttagagaaattgaataagccaaagtcacacaccaaatgaacagcgaagtctggattggaacttggagctaagttctgtctaagcctagaattccagcttttatgcactgtatcatattactgctcacagaacatggcttgggggctatatgatcagtaaagtacaaaggtctacatgtcagttttatatgatataaatgtgatgttgcaccttgtagatgatcacaagatatttttatgtgatgcactctcaaaagactctgaaagactagggttattttttatttgtttgttttgttttgttttgacttcaagtaagactagtaagaggactgaattgaacatctcaactggaaaccattagtgctctgctcttcaaactaaacttcccaacacccaagtctcattactgtcatgcctatttccctcccgggctgtgtcatacacatagaaagtgaagctgggctttttcatttgccatggccaactcacactatcctatccctcttttgaaaaaaaatagaacccttttcagtagctgtgggctcttctgtgagggtgagtcagctttaggaataataaccacaatctttcatccatgccttcagtctaatgtgctgatgctgaaatcatcctaaatatcaatacagaattttgctttagactagggattctcctgccctcactcagtgtaaatcccctgaagtacaagagaaactgtgagcaataaaggaggtgctaaagttctatttgagtggtgggggggcggtggaggcaaaatgctttgctcagggaaaggctagtgcttcatagatggttagagaaactcccttctcctcggaacttttgcaatttggagcccaaccttaaattgagctttactaggacaaatgtagttttatgaccagagcctacatgcatatctcacagttttaaataatgtattcacctcttccggatgatcataatcagtgatgatcatggtgaaactatgaggaagcagccctccatgtgctcgttttcttgttgtctttccatttcatagttttgcttcttaattataatgatgctagacataggctgttaaggtacattgtaaatagggatacgagcattccctttgtataggttgagaaatattactccagcaaattttgtttcaagagttcttcaggacagaatttcgatagtatgtgctttctgtgatatatatgcttaagaagtaagattcactgtatattggtataaaataaaggaagccagatattaacataaaattgtattttggattctttgatgccttaattttatctttctcaaggcagcatcttagaccttcactcctgtgagtaaacacactcctgtctaaagacagatgatgggatctgtttttaaagtgaggatgtatttaaagcctaaaagccaagaaaagagtttctatcttctatttgtagttaccattcatgattaagagggtaggaattattaccataatttagacgcaggagccccttgaaaattctcatcttcaggaggtctctaggaatgttattcacatcatcaccgagtagctaacagtactgagagttgtatgtatctatgtttgtgtttgttttaatgttttacttccctttttgtagcctaatttaggctggatcaaccaaaaaaagtctgttgcatttgctttttataatacatttagagtagctaatctgaaatcacagttttcaatcagaaaggaattttggatgcttttatggaaagattactacaaactaagttttctttcctttttttctgatttagattccttgaatgcactttgttaatgtctgaacattgaatcaaatagtgtatttctcccatttttaaacattgcaaattcaaggcagggtcctctgcttctgtcttcaaatgaatgagaataccattttaagagaaaatggcggctaaagtgtcagtgctctgtatcacctctatcaaagagactgattacaatgttgatggtgattttcaaggccatctccgtcttgcttctgcttcttaagaatgtataatggagtccaaccttaagacaaataggtcagactgcaaaactctgcaggaatataagaatggatttcaaaataataaagcagtgcaactttgagattctatatactatataaatatctcctaatttacaggacataccttttaaacatctttccaccatgatgcgtattggtgtctggtcttgccattctcatgcattttcagctgttatttctagaatttattgagttactgatgtttaatctttaatgatggttgaaggggagaaaaagtacatacaccatgttcaccaattctcactgctggtaaacaaaaaaatttgttctccctgtggggcagggagaaaatatttttgagaatatcccatctgcagataaagtcagtggccatttgtggttctgtcaaagataaaaataaatgccatgttcagctgtattaaatactgtacttgagcataagggagagtgtgcatttgtcttatttcatttgtcttcccagtctatgcccatttagcactgcaatagcagtgaacttcacgggcagtcaggcccagtctttcatgtttccttccagttctaaattgaaaatatttttttgaaaagaactatgacaaaagcaatttgagttagtgatatcttgaaagagaacccaatttaagattacctttatggttggtcattgttacctacagtaggcagatgtcatggtgatcttcttgatattagtattccgagagagtctgacctggcagtgttcaggtaacatcagagagtgggctataatattgagatttcaagtggtggtgcaaagggctgctcacggaaagctagtgcagagagaaccactgtaaccgagaaggagggcagccagccattctcctcatccttctatatttagtaaataccacgtgacagtgagtggctaattaaagtgtgttgggagtgagctttgtaactgtaaactgtagagaaggaaataggaaaacaatggtgtcttcgctgattttccaacctgtaacttaaaatgttgcatctttccaactctttctcaaaaactcaccacgctggtaaaatgtcatcatatctttcagatttgtgtcattacaattgtaacaggatcaatgattcatgaacatacggagctaaagtctcttacaagatgaagtggtgactaggaggagaagttattgttaaagaggaccatctgtctttgaaagtgtgatttactgaggcattcacctctgccccaagccatgaaaataggatctagtgactgggtctcatcgtctttctcttcctgcctccttccctttcttcttctcctcattctatccttagagccagaatcagtcaagagattcagtaagaaatgatgctactgtgaatcacatagcttcttagagcatcttatttacgttcctaaaatccctaccagacaaataacaagtgttaaaattgtttctgtgtttcagatgaggaagccaagacaaggagataaattggcatgcccaatacagaagggtgtcagtagcattgctgagacttgtgtctaagtctctactttgtggattattcacggcaacaattattcccatgagaatccctaattaccacctacatccctgtcagttggtggtgaatctgtaacaattcacaaactgcatattctgcctctgtgtgatgagagaatccactcttattttaaactatgcagaaatgagaggccaatgttacttctaagggaccatgcagtgcagtccagaggtaaatatgaatgacatttagctctgccgttttggctgttccacattagtgcagctctccattcttctacataaccaagagttagttattcttaaaccccagtgttctgtctactcatgcacaatttacctgcatttctcaaattcaccatcctttagtgtgtttggcttttaaatccattttggtgcttacagtttgtgtcatgttcttggcccttagggatgcattggatcacataggataatctattgaacatatattagtttcttgatctcagtagagtaatggatgctgaaatatttcagaaagatgtattctgtaacgattcaggaattgcatactctgcctgtgtcagaagcacaacatgtatgattttatctgtggcttaatcaacaggaaaaaatgccaagcggctttgactagctggcagtggatctgtttgtgtttgccttattttctctataagacacctgctggagatgagagccggcacaaacaccgagtaggtatccagggcttcattacagcagtatctctaatgatcaaagaagccttttttatacaatcttgttcctgatcatgcagctgaacatctgtctacctgtctgtccaccttttaattgcatcatccaggtctctctgatcctagacggtctgtcagtgcagctctgctttccaccatttctgatcatagttaacacaaaatttcccacaaagcaaaacagtaaaactgagagctttctaataaacttgaactgaaccattttatgagaagctaattttctattgcatatccagtgaaacccttgtgctaatttattcttcaaagccaaatactgtatagcaaggaggggaatgtactataggaatacttgaagcattatatttactggatacaaaagaagcttgttctacatagatgctgcaatctgctaaacactgatttgttttaaaaaattggcagtagaaagtcaggaatttaattcactgatttatttatgtattcccttgtcaaatacttattaagacaaacccattatgtataggactgtgtgtgattcaagagtgagatactgtccacactctaaagatgagattcatgtagattaattataagagaaacattatacattgatttctataagaaaatactcaaaaagcggcatggtacttgtctcattctgttttgtcttgctaaaacagagtacccaaagtgagataatttataaagaaaagggatttatgtagttcatggttctgcaggctaggaagtttaagggcatgtccctgacttctggtgagggctttcatgctgtgtcataacatggtagagaagatcaaaggagatgcagacacgtgcaaagaggaggaaacctgaagagtgtcctggctttataacaacccactctctagggaactaatccatttccacaagagctaatccagtctcaccagagtgagaactcactactgcaaaagcagcaagaaccagcaccaagatgttcatgagggatctgccctcatagcccagacacctcccactaggccttatctcccaaacccaccacactggggaccagatttcaacatgagttttggtgcgggcaaacttaaggcatagcactactccagtggagggagaactcacttccagtggggctaatagaaaatgtctttatgggccaggcacagtcgttcatgcctataatcccagcattttgggagtctgagatgggaggattgcttgagcccaggagtttaagaccagcctgggcaacgtagtaagaccctgtcttactaaggccaaaaaatattagctgggcatgggtgcactcacctgtagtcccagctactcgggaggctgaggcaggaggatcacttgtacctaggagttccaggttatagtgaactatggttgcaccactgcactccagcttgggtgacagagtgagaccctgtttcttaaaaaatatataagaaaagaaagaaaatgcctttatgaaaggcggagcccttaagttaagcattgacaaatgaggaagatttgtagcatttaagaatatagtattaatagttgaaggtattctaaatagaaggaccagcattagataaagcatagaaacaggaaaccccaagtcatggtgagagaacagtatgttgtaggctagtttgatcaaaaacctggagagagtaattctatgagaaatcatgctgaaaaagcagattgtagtagatcctttagagatttgaatattatgttaggaacttcggattttcttcagtagaaagcaggaagtagaagtaattgaagccttttaagaagggaaattgcagaatttatatatgtgtgtatattatatatgtgcatatacatatatattatatatatatatatatatatatatatatatatatatatatataaaatatcttgatcaaagcatatagtatggattgcagacggcagagagtggagcctgggagatcctaatagtccaacaaggagtactgagtactttaaccagggcagaagcagtgggagagagacatgaagactgacctcaaggatgtggaatgtacaaaggcagggcaagtgatcacaaatgagggagtgaaagtaacttagagagaggccagaaggaagagcaggtggacgtactgatgtgatggattttgccgtgaacttgttgaatgctcactgatgcaagtgaaagtgcccaggactctattgtcaacatggagttgggagtggatgaaatgcgtcagagtgtagaaacaattcatggttgaattgatagcatctgataaaacatctctaagcaaactagattaactaataagcattgctgtgtcattgagctgatataattctttttgttgttgttgttgttgagactgagtttcactcttgttgcccaggctggagtgcagtggcgtgatctcggctcactgcaacctccacctcccaggttcaagcaattctcctgcctcagcctcctggagtagctgggattacaggtgcatgccaccatgcccggctaatttttgtattttttttagtagagacggagtttcaccatgttggccaggctggtcttgaactcctaacatcagatgatccacccacctcctcctcccaaggtgctgggattacaggcgtgagcactgcgcccagctgagctgacataattctgtgtatgagtgaggaggcttatcacaagtaaaatttttatttaggctttttgagatctttttgaaaattttataatcacctgaggcttccctctctattttattaccttataagaaccctcagaagaatagccacatttaatgggcaggaagcaaaggaggaattggaggtgggtgtggtacaaaaaaatgaaaaaagccagaggaagaggaaggcccttcccaaagttaaagggagagtgctgaggtgggagtgggtcagcacagtattaaatactagaagagatggcggtagatgagaacgggctattgagtgtaatgtttaagaagaaattgtttcaagagagtagtttcagtagttcagttgcattaaaatggtaagagctgaaggaaggagggtttggtgaggaagtggaggctgtaggtgtacacacaccaccactggagaacaggctgtgtttctcagtggtgctagcagaggcctcctctggcaaatgcatgacttgagaaggcagcccaggttccttgtgaagagtctagaggggtgtggtaggggtcaccagaggctacgtctggagaggcaggctcatcctgatcatgtttcctggccagtagccatctgagcattgtcctggttattacctgcactgctgagatacttcaccccacctaatactccaaactgaacagtggtgggtatcaggaagccatcatgaatctcaatatctgattcttgcttgtgaaataacttaagatatgttgttttaatttccttatttacctctctaaatcacagaatctgaaccctgtgagttcagaccgtagagtaccttcagattctaaatcatagagtctgaagatcatttatatagaataactggccttatgcctgagaaataaaaagtttgcttcttattctgtttctgtgcttgaatttgggacttaaactacagttgttgattactaactgaagtctgctaaatccttggcttaggcagcataataacacaactaatcatagccaataataataaatattattaagcaataatgagacaaaaactactgtggttgtctcattcaataatactggctccagggcatttacagtataacattttgtatgtttgcttcaaatttatgattttgggttagatgagactgtaggatagaaactttaattacaagttgggttttttgttcatgtgctgtggaataagggatggaaacctcagagatcttcagaagagtttctggggtctctggagggcagaatagttatactggatcttttttttttctttttgagacggagtctcgctctgtcgcccaggctggggtgcagtggcgccatctccgctcactgcaagctccgcctgccgggttcacgccattctcctgcctcagcctcccgagtagctgggactacaggcgcccgccaccacgcccagctaattgtttgtgttttttagtagagacggggtttcaccatgttagccaggatggtcttgatctcctgaccccgggatccacccaccttggcctcccaaaatgctgggattacaggcgtgagtcaccgtcacccggccctggatcttttagctataaaaaaagtcattggaaactttgattttctgcctcttctcctcttttaatgtcgtttcttcacagtagtttaaatgatggctaattgtgctgcagcatttggtaaatgtcatatatctacttttctaaaagcagtgaagtagtgtaaacatgtggcatcttttttcaaaagatctatccagtaattatcctgaaggctattacagtatgcaaatagcaaggggcgtccttgtctcctaaattagaatatcaatattgattcaacatgttcaaaaagaaaacaatatttctaacaaatgttaatcctgcttcaggatagtggaaaagacactggttgccaagctttgataggatttgagttctgggtcccccattgactgatctgcctgtcatttgaactaccgcccctggtttcatttttctcatctacaaaatgggcatgctgatgtctgttctgcctgatacacatatcccttggaggattgaatgtgataatgacttggtatatcataacatgccatacaagtgtagattattattatttcaggagaaactttgtcatctctgaatttttaattattactaatttgaaatgttctgagcacccgatttgttctggcttccacatagaatttaaattggcctcagataaggatgtgccgtgcttcccctctttcatattagggaagttgaggcatgtagatgtgaaattgactgctttttgttttccattgaaatcatttctccttgcatactattaatgagcttactatacttggtatcaattaaattcacattgcctgaaattactgcatgaagctacaaaaaataatttcttctgacaatgaaatgatacagtcttacaggtacttttagttttaatgtaaacatgactgcctctgatccatttaatactcccatcttggtgtgcttgtatgtatttggaatcccttgactttagacttgaacaaggttgtcagcgactgtgcggaagtaagtgtttttgccatcacaccaggtggatgacccctccagctgttgtttcagtgggtggtaagaaacagaagacaagcccctagtcttcattattcttaggtgtgaaaaattctcccaattgtgttttccataggttcccaatataccaattacttcctaatgtcatgcagacacctatattctcagaaatgccaaagaaaggctgctctgcaatctctcagaattattttcccagctgaatttgtcagtccaaatttaaaagagcaacaggcaattaaatattcatttttaatttttttgtcactcactgctgcaggtcacaggttttataagatttctctgactgtgtagtactgtatactaaaccctgttttgatagtattaattaatattctcttgcaggcccaagtgagggtgagagagagatttggctgggcattttggtacagcaatgctaatttataggcctgggcagtggaatattatggaagtgtgtaatgataatatcaaaactgcatttaattcttgaagaggaaggaaggctagcacatgagagacagaatctgctgttctctttgtaagtgaaaggtcatgctactgagcgctgcggggtggattggtgagaaatgagctcccgtttgctaggaattagaatgagtctatctgattttccttcacttgtgacctttaaagatgcagcttttagattgataagcaggtggatgcttttagtaacccaatgcagaatttgtttcatataaaaagactatctttcagacactgaagatattgcttccacaaagggtttttttctacaaagcctctggagaaagaaattcagtgattatatcttatctgtcacacaaagagaaaattcagaattactgtatgttcaattagaacatttttttttccctcaaagcattaatcatttcctggaacacacatcctccagttaagaatctctaggaaggcttgacagtgggcactcctcgttgctctcgcctctggatttcctgcgccactccacagagcctcctccatgcccataaaagagcttcctatgttgctatagtaatcctttcatgttgggcactacgctatcttgaaggcaatcagatgggaacaaggagtggggagcagtatagagttaatgtcaggcagctgaaggtgatctgcgctattctatttggagatgttttggtatgctgaagacgggatgccagtcaatgcaagcccttagcccactgtgggcccaatttgatgtttagatatttaaatatagagttttttatgacacttgtgaactctaaacaagcctttggatttaaacaagttgaaatagcttactttccatagccaacaagctcaaatttctcttcctctccacttgttttctgttcgtaattacatcatccatcttatttgttctaatttcctccttttattttccttatctccccagccatcaacagctcaagcccatcagtgtgtgttttattttgtcaaatgctggtgttttattggggcttctgtgctgtttctgtttctcatttgatattcctacctgataataaattcttcataaagcacccctgatcaaatacatcagggcttcattcttttcctgtgtacaggttttaatttcctactcaaaatcacaaatgaggtttaaaaaaatgcatttctcccgcacagtatgcctgactttttaaatgtttagggaaagcagaggagtgagctgagtgacttccatccagcagacttcctgccactgtctatggcaagagtcatcagctctgttttcctctctaatttaaaaataccctgcttttaaaaaaaactaacccagtagcgtgttgtatagaccacgtagatgaacattcccctcagaagtgtctcaacactgcagagccactgtgtatagaaaatgccagcttatctgcaggcagaaccaccaggcctctgcagacactgctctcacctttctgcccttccctccatctgtttacatgtgcatgcataattccacattcactgaagtcctcccaggcactgttctaggatctgagcacgacgctgtggcgctcgtggaatctacattcaaatcaattttgacctatctgaaagagaggatacctttgtaggaggctctagacccacactgtgtgtcacagaaagcacttagcccttatggctattgaatttaagttaagcaaaattcaatacaattaaaaattcagggccgggcgcggtggttcacgcctgtaatcccagcactttgggaggccgaggcgggcggatcacgaggtcaggagatcaagaccatcctggctaatgcagtgaaaacccctctctactaaaaatacaaaaaattagctgggcgtgatggtgggtgcctatagtcccagctactcgggaagctgaggcaggagaatggcgtgaaccctggagacagagcttgcagtgagcggagatcgcgccactgcactccagcctgggcgacagagcgagactctgtctcaaaaaaaaaaaaaaaaaaaagaaaaaaaaagaaaattcagttccttagtcgctgtagccacacttcaagtgctcccatatgttgagtgactaccatattggacagtgcagatacagaacattttcattgtaccagaaaggtatactaaacagtgtcactgtagatcgtccaccattcttaaaggtaaacaattattacagaggaaaatctgtaaataaataactttatttatttatttttttattttttgagatggaatctcactctgtcgcccaggctggagtgcagtggtgcaatctctgctcactgcaacctccaccctgcgggttcaaacaattctcctgcctcagcctccctagtagctgggattacaggcgcccaccaccacacccggctaatttttgtatttttagtagagacaggttttcaccatgttggccaggctggtttcaaactcctgaccttaagtgatctgcccgcctcggcctctcagagtgctgggattataggcgtgagccaccgagcctggcaataactcttatttttcatctccagaaacgtttaagcttttctggcttcttcagttcttcctgagaacagtcagctaagcaaaatcaacatgttccttatcctaacctgggggtagtgtgaggtttacaggaacaggagggaggagggcagctgaaattgaggctccctctgagctacctgagtcatctgcctccagtggagaaggtcaagatgggaaggttaaagaggaaggtcaaggtgggaaagctgagtaccaatccactttttcattcattgtttccagaaactttttttaggcattgagaggcaattgcagtgaagtaaatacaatatttttatctgtagtggaaggaaacaagggtcaaacagtgacagggcagcatgataagtgccatgatataggaatgcctgagagactgtgggaacttggaagacattgtacctgactgccctgtgaagtggggacaagggagagaaataggaagaggtacatcagagaaggaccacaagttgtgtgggcagtgtagttttagtttgcttgtctttgatgtaaccctctttagcataaactgatttgaaagccaagttatatagaaacaggggttggtgatttttttttttcttaatcataaatgtgatgctgtatttttttaaatcccgaaggtgattgttgatttcataaaataagcactcataaaattctgcaagtaacaaaaccctgtcgttcctttgaaatgtttgctgtaaaatgtaattttttctcctggacttctggaagaaaagtatttcatttggagctatgtgtgaggtcctgctagaattctagatgacccattctctccccaacatcatctcttactcctgatcatgctggcttccttgctgtttctggaacacaccaaggccattctccctgtagggcccttgttttattgctccatttgcctagaatgaaacacacttcctcacagatattcacttggctgtctccttcacatgctccagattctgatggaatttcttcacacagaatgtcatttcatcacaaggccttgctgaccaccctatatgaaatatcagcctccccacacactgccccaactctcctaaagttttcaaagcactgatcatcacctgacgtaatgatgttattgtctatttatggcctgactcccatctttaggatatatgctccctgaagacaaggacttggatgtatataccgtcatatgcccaacacctagaagagtccctggcatgtagtacgtctcagtaaatagatactgagcgaatcatttctatcttgatttatgttatggatcccaaaaaaatggttaggttaacctttctgatgatccatttcactattccttttgtaaagataattgagacttggtgttttgtggcaattcgtaactcagtaattctcagtaacctaatctcagaggccactctcatcttcaccacaccaaagaactgttaagcaaaactgatgctctgttgctgtttgtcagctgcctggttgtctccagtgtggtagtgttcaaatacaattcactgtgtttgaacgcttcttctggcagatgactagagtgcgctggagaagcagcagagtgtgcctgtgaggccaggagcgtggagctctcaaaggaccatcttgtttttctggttttaaaccaggtaatctgggcttgccttttttcctgcctccgtcccctcaccctctgtccctttcttcgtttctttcttccgtccatcatacctttcaatagaataacagcaactaataatgaaatcatccccatggaggcaggtgttagagttccatccccatcaacctggttttcagtgctgtagaatatcagtgtataaacttcagaagaaaaacttcagtgcaagatatacaagctccttttcttgcatagcatgtcattcttaattgagagaatgcaatgtgttcctgcttttctttggatgcttggccctaaatctaaacagaaaagaaaggaaaggcagtgtttcaaacaggcaatagttgggagaaggggtcgggagaaactacttctcttttattgattttgtgaaattgtttgaagaatgattcagcattttgggatataaaaataacagcttcgagtagcttttcaattaggcgaatgtacttttgctgaaaggttctgttgttcttgaaatgcactttccttctgttcttttggagcctctttaatcagtagtgatgtgacaggaggtgcggcaacctccccaacacccctgcttcttcctttccctctctcttttgtgaggctgagttgccaggaaaactgattggcaaaattgttccttaactggggggagaggtagttctgtaaagacaggccctatgcagaacataacaaattgaactaccagaatgtatgttttaccccagttgggttctgtttcaactagaaatcctaagcagccatggactgcgtttgaagcaggcacttattgtaaattaaaatattactgaggtttccatttttaaaaatagtattactttgagcagggtcatgagaatttttgtttcattattgtgtccactgtcaggtcactgcatttaaactcctttgaaaatgcatatagtaatcagttttgtatataagctgaatgccctgagccttaacagaatggctaataggtgtttcctggcctaaacaaaatgaaatttcctttggttctctttgtgtatttgttctggagtgtgagtgtgggtgtgagtgtgtgagtgttgatgtgggggagaaaagattatactgtagtattatattagcccttgttgaataaatttatgataatgggtgctacagatttgctgcggttgcaaagtaaacttcagtgtgcatataacgagtagcaatttcgtttgctaatttaaaaagattatataaaaacatttttaaaatttaattttatttacacatatctaaactaccacctcttttagaagaactgaagaactaagagctgattatgtctcttgttacttatgcttttacgattgacaggtgtctgtggcctttgagtatatcatggtgctttctgctaaattatttcattttcccctcaaaacaaccatgtctatgataattttatggatgaaaaatattgaggctcagaaaagtaaagtaacatcactctgtaaaagctgatattgagtgccaaggtttcaggctcttggcggggcaccggggattcatgctaagattcaagctctgccccacaggacccacatgatgagagagctacagtggctcagagggaggggttcaccgagagctcagaagctccaggtgtaaccccagctgcctgtgtgctcttagacacattaatttctcttctacctcatctatcaaacttaggctactgaataccctctttgtatttgttttcagattaaatgaaatatatgaaaacacatagcagtcactcagtgagtgttaaatttttctttatatttctagcccatgtcttttcttctttccttataccaacttgcatcatagacaccacacttgtaaaactctttcaacgattccagacttcactccttactagccaggtgaccttgaacaagttattcaactctctgtgcctcagcttcctcacttaaaatggggataagactactacttcattgggattttattgagggtaaatgaactaatgtatctaaagtacttagaacaatttgtagcacagagtaggtacacaacgaagtttacatattatgagctatattagtttttctcctttagattataaattgtgttcacaattgttttcagtgtgaatgtgtctattaaaacgttttagtaagttctaagtgttcgatctgattttaagcctgaaaggtaaagtcatactctcctgagtccttcgactgtataaatcagggggttggcaatttggtttctgattccttggcattgactgatcaacatttggttcattggtgagcatttaagaaccaccagtgagagcataagaaattagcaatccttcatactgtcaggcagcattgagattgagctgtcagaggctgagggtgaatgcttcgttggattgactcactgaaccagctgtatttctttgtcttccatggcattcttggatagagtccatttaactaggaagtaaagactttggtcagttcatttaataagaacgaacttagaaaatcctgcattaaccacttagacgtattgaaaataggagaacattagttatttaactaaactcctttaaaaatcaaaaatattagggcatgaaataatacataatacctttgactttaatgcacaccctacattgtaactttaaagcattagaaaatgtttgtattctttcttttttaaaaaaaattaatcagagtgactggggtggttgtagtggtgaagaaaaaatagaaaaggaggaactagacatttggaattgtgcttggttacagtatgtaaactttcatgaatgtgctttattcctttttgaaaactatcttcctcttacgtttttcctttctgttttttttttttagacaaaccttgtctgactgactataacctttaaataattggtaaagtagagcagtgaaactgacatgaaaatctattgaaaagaaatggaagccgggagcattattctagtaaaggactggctagcctattgttcccttctcttgtgctgtgtgtgggaattatttctgctggcaacagacaacatcgacagtagtagtattaaaataattcacatctatttttgttagtaataatgtaatactggatcatctctaggccacaaaataattgacccatttctaggagcagaaagtcttcaaactacaagtgcttctcttgtctgcccacgtctgctttctctgcctcctcaccatacacacacacacacacacacacacacacacacacacacacagagagagagagagagagagagagagagagagagagagagagagtgtctgggcttgtagatcttcaccctggttctcacaggcccccctgcctggaacgccactttcagcctcaataattttaccatttttcaggagcaagtctaggacccgatcccttaaagcttttcttcacttgtccattgcattcagtcctattcaagagacatttgagcactggagataccacgctgaacaaggtgggcaagcctctgtactgagacctcacagtgtagtggggacttgtaagcaaggccaggcctttacagcagcatggtagacactacgacaggtggcacagggccctgtgggagccttgcccagaccttgcctagtcttctgcaccgatcccactttgccctgaatgtctggcgtggctttagtagcttccagggaagttggcatttaattttttgctgccttgcattgttttctttctgtctgttatctccctggctggatggtaactactttgaggataatggacttcattttatttttatgctgcctttttaaaccctatagggtcttaaacagcactcagtggatggtaaatactcagtaaacactcactgatttgcttagaccctcttcccttccctccacctctgtggctttacacagggatgacttcccctcactgcgttccttccaataccttctataatttgaaaatggctggcctctgaaccttgtttgcttaggggcagtgaactccagctgattatagtcattgtcttctggccctgggttcttgggcagcaacatgacttccttctaccaacctatcctttcttcctcagctcccatcgatttaattatacttcaggctctccaggcacagatctaccatcacctctttttgcgtagcctctaaaatgctttcctctttcagggactgttttcctaatgagggcagaatataatttagaggcttaattttagaaaactatatgaagcagcagacccataaaatgttatgattcacaaccacttgttttgttctcataatgcaacctaaactaaaaagccattcatcaaagctataaaagctgttcatggctgtctttagtatatcgtgtggagcataattcagcccacagagaggctaaagatggattcatggggccatttgccttggtgtacgttaaaggccagtaatttctatgctctgtagaatactgtattttactataaaccctggattttttcttaaccccacttagctttcgtttccattttaatataagcatgtccccatttataacctcttccatcccctgtaaataattgccaagatcctgactgttccctaattcatagtccttcttgtctcagctactttgaccatttaaggcgattggtgtatgaagatgtgttgaccagaaacccaaaatgcagcctccatggagagctgccttggtcatctgtctcctctaacaacaccctaggagaaccattggtcctcccatcacagctccccagagagcaaattgccaacactttcctagaaatgaatgagggaacaaagctgtgggcattctgggctatgtttttatagtgttgtgataagaatgcactggtgattgtgaacccaagttgctaactatagtgtcgtcagaacttaagatgcctcttatattgtgttcatatttaaataatgaggtctgacctttacatttactcataatcatgtatctaggtcatcacgtcacattttcaaaagtacaagataatatcctggaagctaaaggttccagccatagggtagatgcagctgggtttgaatcctggcttgggtaccagtttggctgtgcttccttaagcatgttacataaccactcattttcttcatctgcaaaataagattactcactgaacctatcccataggattactgtgacgatagcaaaaagataatccatataagacatcaccatagtacttggttcatggtaatcagcattacttattcagtaattcttctttttattaagagtctaccaaaaaaaataataaagcaaggaactggaaggatcttattaaatctagacaaacattttcaataaaactctaagatggatggcttgtgtgtctttgatacatgttttactttgtagagctagtttaaattgtgttgtaaacagaaggacacctaacaaaaaatgaaccagttatttatttaacctcatgattaaatgtcagtgacatggtgttcttttttttttcagttagccattaaatatagtattatgattttaaacttaccttttgcacatcagttgtttagctgaaaagtacattctttttatttattaggaactaagctttttttcattgaaaactgctgtagttatagacagctcatgtatttccacttaaggtgtaccttgtactgcatatttgccctggatctgaagatccatcttttttttagcagactcattttaaactctcatagaactaaatgatttccttgaagaacaagtttcattatttggcagatgaaactggaggtggccattcagaatcttaagctggatcacacgatttttaaaagctcaacaactttgaaataaattcatgcaaaatttataatagaaaaatggttaaaaaaattgagaattgttttgaaagtggctttgcccccgttttaaaaatctatttttctgcaagatgtaaaaatagcatttatcttagtgttctctttaagctcaagtcttgagggggacagttccctaaaattaaactcttttggctgaattaatactcccatgatttattatttttattgggagttcctgggcattccctgtgctacaaaagagcctgcctcctacgctctggataagtttgttaggtctgttcagaatagcttgacacaactatggtcaggcatcttccaggacccatagctttaggaatgctcaggcaaaaagatacagtgtggttctttctgtagcccttttccataatgaaagaaacagattctgtcttgtagttgggtggattttcccaatctaccgggagttcaatccatttatagctaacattaggtcaaggccagaggggccatagccctcgcagttgtcattagtgagctcttatttctattccattgagaagctgaaattgacaaactgtctagggagatgtgcagtttctagctgcctgtttttgagcagaacgcattaaggataggtcacttctcatggtagaattcctcgtcattaatcactgaaagaccaaattcctaggtaaataagtaaactcgttgataaagccacatcttgatagaaaatgtatcttcttgacatcctcctgtctgccagcctggtcagcaatgttgctgcccactcggaacagactgccttgtttaattctgttgatggagatacaccacggatctgtgaagatctgagtcgtagctgttgcaggaggcctgctttgatttgtatacaatgtgaataactctctgtgtattcagagtgctgtaattttttcttcttctatgcctacagggactggattgccttatcagggtaaagttcattcggtaggactaacaattaatcccctgttctttctgtttcctgctttcttatctggtggctacattatatacaaattccagcatttttcatcactatgccacataaagcagtttggagatgcaagccataaaaagcttatttttataacccctctagaaagaaagctgctcagattccatttgagtgaaaaaggcattccattttgtggccatgtttacatctactacctaaaccaagttctgggagaatgagatgaccggctgtgactgatgagtctctattgtccaatagagtcaaagaaaagatggtatatttgttaaagctattcccactatccatgagcttcctgtacacaccacactgtctgttttgtttctcttgctttataacttttgaaacacagaaataagatagtctgtagaggttatcaactcaagattcacatccttaactggatagcaaatgtcttactaattgaggcatgtatttaactggattaaatccagtggcttgatgttagcatgcattgcggccaagtctgctgtcctttgatgagaaggggcttagctttctacagctgtgcagtatgcgagtcacgcactcatcctagggtactggcttgccgtaatttcatttggggacaggggaacattgcagcgtgatgagctgggtaggagctaaatatttcacatgtaagaaggaatattgttctaattaaactgaatgcggtgcccatggcaagatctgcgcttaatatatttgggtatgtgtgaaaaattacatatattttttataaatttgtccccaccccatccttgacaaaaagcttttgttttggatatcatttaccatagaggaattatgtcattaaaggtatttcatagcacaataaaatctgaagagttgtaacagtttccccagcccttaaatgtttttctttagaaaagggaagagttcagttttcacctataacttgtaaaatgaaagaacaaaatctctttgcattatctaatacagaatctattgtacaaatccctggggttttaactgtttttcatttagaaaagaaaagcaattatagcataaagtagatcttggatattcaggagaaaattgggactgtgtacaggataattcccctttcttagcctgaaactttgctcttacatggtctttgtgaaatatttggttggggaggaggtgggtaaaaatgttaagtatctgatttcacttgacaacccattggtaggcattgactatacccccaaatccatttttgcaaccttgaaacgtctacttaatatattacaattagaaataagtgctaatgagtctagttttctgacttatgggttgttaaagggtctgtccacaaagggctagtggaatgtgggattggagaggatgacattcttagggacaggatcgtcttaccagtggtctctgaaggtctgactcaactgtcatcttgatttgggtgattcccaaatctgcagcttcacccttgagctcacttggaaaatgtagtcctacacaccatccagctagtggaacacattatctacttttccctgcccacgtcctccaggcttcccatcttcggcagtaagtcctagtcctccagactcaatcttggcattttcctttattccctccatcctctctcaccaccattttgtgatcaaccacattgtataaactccttccttgtaattctaggatctgatctttcctgtggagactgctgctcctccctccctggttcaggccagcattgacttgcctggcaatgctccagtaacctcttcgctagtctttttactttcatggtccgcatttcccacccttatcacacaacattcagtccttcttacaaacttctgtagaattgttcttcgtggaatacactgtggaatgtggtacctctttaccctgttccctctatactcatcgacttctaactaccttcagtcatttttcaacatctataggataaagtctctatttctggctctggcattcagaaccctccatagtaatgacaaaataaggcccttcttcctctctcttaactcctaccagtcctttctgaaatattcatatgatctttattatgccctgctccttatcctagttatatgaagacctttcttatctatcctactaaatcctgagttgctagaggttaagttctatttcttttacttgcttatatccaccacatacaattctaacaaactgtgactagtaataatgatagcttacatttactgaacattttctatgtgctagttactgttcgaagtgtttacatatttttttctcatcttagttcacagggcgggtattattattctttccctttattacagtgcacatggaatttaaagaggcagaaatgatcacttctatgcaacataatcaggcaaggtttcatggcaatccacaggatatagtggtgagggaatttattgtagagataagcttctctgcaggggatgaaaatgtgattggggaggggtgggaattacaggataggtagagaggggcatggtcatcggaagtttgataccagggatggaagaaactgaggatgaggatgaatcttgtattaagtacattggcaagcagtagagaaaggagttctgcagagatttgtgcctagaccacttgctcagtatttagcacaaatggcttcatattcttctttttgtctattctgtctgtacagctagatcctaaggtccttgatgaaagggaatgcagtttattctttttggtagtttcagcatttagtctatactaaatgcctagtcagtgtcatttgatgacgagtatgagaggaaaaaataaaaatattacaaaaggcagtctctcctccattaacagaagccttcttcatgtgaaccaagcatgaggatggcgtataaaacctatttggagcaggaactttatgaagaatagaagagcttctttcctctcatctttcacaattactcgaccctagtaattgtattgttttaatctctgaattcgatgaagggatttataactagcatttctactagttaagatctgctttaattttgacatttagtggaatagtccccataatttcactggactgtagattattgttgttattattattaatgatagtgttctgcacattctgttgttgttaaagaagaaagcataccctactctttagcatgcatttcagggagctgtgagccctgtgtattttgtcaagccatggctttcatcgagtctccgtaacaacattagagcttggtggttgatgtgagctttcagggtatcaatgctgcataataatactaataggcaaaacaaaacagaaacttgtaggagcaaaagatgttgctatggcttactttgtggtggggcattgtgttgctggtcagcaatatgttcccgtctactcaagctggcttttggctaccaactgtgagatgtttcgttgctgacaagccttccccattctgtattttgccctcgggctcgcaatttactggatgcaatcttgttgagaaaatgtggtctttattagtgttcggcacagatcgacttttctttttccgcttctgcagagctagtgggatgcttggtgcagggaagaaacaggggacagatgacagtatgagggcaggaaaataagggttttcgggtgctgagaaccagaatgctggcttagtgtagagatgattggagcagcatctagggtagaaacagcttatttgtacccacagggcttttggcagcattctaatcaacaactaattgtcagagaaagatatttgtcaataaaaatacttgtaagttagtttttaggtacatgacaaataaggaaacttaattgtataagacagttcttgccctccagagttttatgatgtaatgagaacacaaaaataacattgatgctccccaaatcaccatgaatatgtatggctttacatacaatattttatttttcactgtgaggatctgtgcgtgtattcttgtgtatatttttctatctgtctccacgccgctttgtctgttgacttggctctgtttcattcatctaatgtattctacaaagagatttgtgagtggcatgctgcagctacctcttttccttctcccatatgctgtctctttaacaaatgcccacacatgtgactttccccctcctaatcctgatggtgcctattgttttcagcagttcctcgatttataggtgttactgggtagctttttaagcacaaatacaaatgcattgcaagtggaaattaaatgccagagcatctgtgaaaaatgtaaatcatagtcatttaaaatagtcattctatgaagaattgtagagatgcgaaattaataaatactagtataagcattaaatattcactgcctgctacttctgaaatggtacaacagcatcattttttaatgatgggtaatgataaaacacatcaattttaaataacctgttttctccttttctccttctgaagctatgagttggcaagcttgaaattaaatacaagtaatggtaataactaagcttctgttaaccttagtcatggaatagacacatttttgtgtttcctggatgttctgtggctatttgaaaagactagtaaattgaaaattgcagctaatgggaccagcttgaatttaaagaaaaaaatatgtctccgttagtggaaaacaggaaacgtggaaccttaagtagcaagcgcaccattatcctctaacgcattcttatttttctccttattaaggcttactgggtcctcttagagaagttaaaatgaacctttaactaagatacatttctattccctcccctccaacccctctaaaatctcttaaaaacacctttatttttagttatgcttcactagttctttaataagttacttgcaaaatacaagagtagaattaaagagccaacaattatatcttgaattcatgtgtccctatgctaccaaagaactgtgtacaccttttatcttcaatcttatatgccatacaaatggaattgacagaaatttttctctctatttcatagatgggaaacagtaaagcatctatctcctaaggtcacgttgtaaagcatgttacgagtttatgtgtcctaagatggggaagggcaggatgttgtgagtcgcgagcctgtctagggaggttggagtgaggtaaggcctcctgaaggaaatcgcacctgcactgagatctgaaaaatgagttggaattgattgggcagccaaggggtgagaaagacgtgggcgagaggaggacatgggtgagaggacgtgagcgagaggaggtaggcatagagaaatgactgtatgtggctcccacggggaggggccatgccatgctgttagtgggcctgattctgggcagtggcgcaatgtggggaaggatttttgtgaaattgaaaggagtgggttttcccaagtttttccatgctcattttttctcttgagctggttaagaaaatggcatgaccatttagagtggctgaaatgtaatcctgattgcagacctcagttacctcaactgaaaataccatggcagcaaacggccttgagacaaattcgtgggaagggactttgtagaggacccagggcaggagtcaagatggggccaaaaggagagcgcttatggtgaaagcaggacagatctgggggaagacacaagatctgaacttctgatgtcattgcggggtcctgggctgccaccccacccaagaaataccggtatttatagatatctaaagcatccagcctgtaaagaaagatataatgaagttattaatcctatgaggactatataaaatcaaaatctcgtcctgtggttctaccttctttactacacgttcaagagctagtgattatttctcccagttttcgttgttgctgttgtcttgtctcccccagtttttaagcaccgtgctgcaaaggccaggagtggctctgacagaaacattgccaatggcattattaccctggaccattgtcaagattttgtattaacaagttgtatgaaactgaaatgcggacaagggaagaagtagacttttttaagcccagccattttgtttttcaagggacaaatctccctgggcgataactaccagattgatggggatagtgaaatggcactcagaaaggagaactgttaacacagtgtgcgggcagagcctggtgctcgtgcttaagcacctgtgccattccgtgattcagagcaagaaataggaaacaaacccctgttgtctaaagggaacctagcaggaatagtctctgtgtttccatttgaacagaactccattaagagattactaactaagaagcactaagatttgtggttgaataagcaattgaaatcaaaccctaaagcttatctagatgaattcacatgctcctttacctgcagaagttggctggaattatgcacaccttatgtcaatgttgaaaagcatcgggtaggaagtgtgattttcagggaggaaaatagatcttgaaacccaccaaaatgtactgtggttgggggacttttctggagagaacacaacttctatttaatgggtatgaagaccaacactctagtatgtaatgtcagtgtgtgtttactgtgacactcctttgtcatgtatcttcaaagatggcattgaatttatcatgagctatagccatctcattctttctccaggcgatgttttgataaatgttgatgagtttataactgtaaaaccaaatgacatttatagtgtgatacacactttacccattgcataattatatctaatggcttcgcatgtagaaaggcatttaccatttgcttttgtataaaatgacaatctaaaccccagggctaaatttttttttttaaacacgatgataaagacttaattaagaaccaaatacaatttatttttgtaactggcatttaaggtacctagttctttggttaaatatgtgataaaaatcatgatacttctagtaacaaagatcagtgggtttcatttatttccctctgtctgaaatattggtgaactcacttaattatcgaactgatatctggtatgacttcttgtttctcatttctagctaaaagagctattttgaaaggtagcacagaatcgaataatgtgttcagttaatgaggaacatttaagagatgtttctgaatttaatatgatggaaaaaaaataaaccaccactgtagtatagacattctttatctagacagtgatgatgtcttaggcctcttggttgtggtcaagcaaggttttatttttagccatttagacattttggaatgtttatcatcatacagtaggtcacttaatagatcaaaacagttttattcttagtcttcatgtcagaaatagctcttagtatcttgttaggatatctactgtgttcatgtgtgacgactaagtagctttcttggaaacaagtctgctgttgtagtaggtttatctttctgacccggtattgaccctacctgccctgacattgacggcctctgatcagcctaccaatgagcagaagttaaagttgttctctctgtctgcctttccatggtaaaaacttcacgtcgttgctttttttttaaatttttttattatactttaagttttagggtacatgtgcacattgtgcaggttagttacatacgtatacatgtgccatgctggtgtgctgcacccactaactcgtcatctagcattaggtgtatctcccaatgctatccctcccccctccccccaccccacaacagtccccagagtgtgatgttcccctttctttacaggaaataaaactagatcgaaataggtctcttctcaagtgtttcatcgtagaaataatcttattttgagtctcaatatttctgaaaaatatggaattatttgtgaataacatgaagtttgtcctcttcaaattgctaatgttagatcctattaaaaatctaagcctcatggaatgctggagagttaaaagtttgtttttgtttgtttgtttgaggttaaactcataataatctagctgtatactagttaggtctaactgattaaactaatgttttttttcttttaaaatatgaaaacagtttttatatacacctgaataaatgtggaactcattactattagataataagcaaaaaaaaaatctgttcatcttagctcaaaaatcaagagtagagtgttcactgatttctgaacttgaatgcacaatttggagaaatgttgcaactgagtataatcctttggctaagaggcttaatagaaatgagaaatgcattgaccacaattaaaacacagaactgagattcttgcttgtgtctgaggtcgggattttaataatgcatctgtgaactgctttcttttgcctttaacaaaattatagagcaatggtctttgcaagttcctaaaaaaaaaaaaaatctataatgaaccagaaaaagtgatattaaactaacatttaagaccttccagagagattgcagaatttattggaagaaggaacagagtaattttctgtgtaagagtgattaggaagaaccattttcatgcttttagtctgggacaggtggtatagattaatgttgaatacatacaaaatctattcagactaattaaagatgcatatccacatggaataccacatctcagtggatctttggctgcctatccaacaagcacatgtagtgtttataccaagcatttttcaaatttagccaagaatagtaccagtgaaacttctgaaaactgccctgaaaatccttagtctctttgtattataaagtctctcttgagaatttctacctccaataaatgcttcttggaatagaaaagattgtaacctgtgttcatctataatgggcacaaatattatatagcaatatagagtattagttgactgtactgatcaaaatcctaggctgggcgcggtggctcacgcctgtaatcccagcactttgggaggccgaggcgggtggatcacaaggtcgggagatcgagaccatcctggctaacacggtgaaaccgtgtctctactaaaaatacaaaaaattagctgggcgtggttgtaggcgcctgtagtcccagctactcgggaggctgaggcaggagagtggcatgaacccgggaggcagagcttgcagtgagccgagatggcaccactgccctctagcctgggcgacagagtgacactctgtctcaaaaacaacaacaacaacaacaaaacaacaacaacaacataaactatatacagagcttcaatttaagtatttggcagtggctataagaatgaacttgaccctttacttcctgagagggcatccatttctaacctgatgcttagcctgataaagatgaagctgtactaaggacctatctcggatgtttaatccaggagagtgaattaacacatcagtccctaagcctctgtccctcatccaggttggcttaataccctttggtgacttgattgcttcttacaaatgctaatgaacagttcactttgacactgtacacaaacacaatctggtggttgtgttgagatgtttttcatactgctaatgaataaactcccagtggttcacagttagctgaaataagcagtgacttgaggtagatcccaaaagtgatttattaaccatgttgtaaaccaagtggactggattttagagaaagtgggaatgttctcttgaattcaagggccaaagtaagaaggatattttaaataaacgagcttaataaccttagatattattccataccaacgtttttattgggagtgggggtgagagttgggaatatgtacagggagataagaatgcccatttatcatttaacagaagaggtatcaacatttgtctgtaaagctttctttttaataaacattgaattggagctttgctgggccatcagctatccagtcagtgatgggcttcaaagaggccactctttccttccttttaaggttttcaccaataaagcaaatcctgtagttgcaacaagaataagaaggaaatgttctggaagaaaaggggagggggtgcccagaagttatggggaatagattgatatttatagacatcagcaatggtctgttaccaacatttataactccaacagtagcagattgagggctgaatcaacatttttccccctctgtaaaataataaatatggtaaagtagctctcagaactgcctttatcatagggataaatcaggacagtttgtgttgcaggagagacttaaaacttataaatatgttgccctttaggctactattcatcaaagtgtctgatatgaaatctagactaaaggcttttgttattgtgtgtctgcgtattctcttttagaagtctaaattggaaagagcgctgtcattttggtcatactggcctgctgtgctacttaaatgcatgtcccttttgggatgtatttgaagagaaggaaatagtgggagttgacgcctgcacacttttacacaaatcctcttcgtcgcctaaaccttccttgcagagggcataatttccagcaggaaaaattcagtaaataaccgcttgacaaatgacctattttggtgcagtcaactttcttcctaagacaccggagtagagaggttgttcttaaaagcctcatcaaatccagagggacgtagctttccttcttggtgctccaattcaaatgtatacaaataggcatggctaaagattctttcagtttgcagagggaaagcatatcaggctagtgacagatgctttaagtcacatgacttgatgggtattatggtatatgaaatctcatataactttgcaattctgatctgaatttcctggcttctgtggtttggagtcagagttgaagctccaaccctgtcctctactccccttggtgcctttaaatgttgaatcacgtatggtgtatggaatcacctgctgtttggaggcccccacagagtatgtactgagcagttttccttttttaatgtgtagtacagctcctagttttcaagaataactaattgggagcataaacctcattttgtccttgaatggtttgcaattcaggagtcctgaataacggaaatggagggcctacaaagagggcatcgaagcgtgctgcagtttgataatttgcccacttggcttgggtaagctgctggtgtggaattgctctgggaagaaacagcagactctctcaggtcggtagcttgtctctgatgttgatttgggggaatttagagagttggggaactctgatgaccccttggggcctctatcctgccatgtgtgttttcacaagagcaagtgtgggccactgggttagtctggatttgcttgaatgacagcatgtggattgtacacttagattggagcgctgaagttgcaccaggccacactcatttatagaaaccattgttcctgggagtccagtctagaagctatggccgaggagagaaatacttcgaactatgggatccaaaaagcccactggtccctatgtgacacccaagcatgtttacctcctgctgggccacgtagccaaccagaagagcgcaatatggtgatgtcaagttccacctgtgtgtcgaactgaaaagacggcagctctgcagccccactcattctgttgaggtggtggcagtttgacttgccaagtcaaattccttgtactctgtacaagtcagaatgcccaaccttatcactggtaactgactctaaagaggggctcaggaacgggagagcacaggttttctctttatcagatgcctttaaagccgcttcgcagcacatccctgtgattgctaacaccattatgaagattgacagtttcatcaagaaagcaaagaagaaaatctgcaggcaataaatggaggcagtgctgggccctgctctggttaccctcaatagtgcttccagagcactgagctggggtagggtcctttccctgcttcaaggacctgtggctttttttattgagcacagagcctgagaacttctgtggcccttttcctagtacaaataggtagctttaagacttaatgaggagaaatctgaagagtgcagatagagatttggttgtggtggtgaggattggttttttccttgcctgaaaaggatgacctgaaaacaagcctctagcattgtccagcaacctttccacctcacaggctgaaatgcatatcccaaagtctgcaaatactttagtacagtggccaaactgaagaagctcaagtgtaaaaaatcaagaatgttcttctaaggacacagaatatctctgaattgttagtagttatctatagctaataattctgggcactctcttaccccaagccagctgcgtcacaaatatgtgggctgttggctacaaggccagtggtgtgaatgattcaatgcaaacccatcaacactactggaaaaacaattcttcgtaaagacttactggagatgattcagtgccatcatcagcagaagcgagcagctgtgtgaaaccactgcttctctgagcctgggatgtgttaacgatatattctcagaagtaaataatccttttgctaacaagacgaaccctatttactcactttcattcccttgaggtttgaattcagcccggtgaccgtgtcataaatatcattctgacctccaagggggctgttcctgaatctgagttcttttgcacgtgtccttctcggaggttaaactgtccacccagccatgttgccttatattcgtcatattttttaaaggaaccaaaggggttaattggtttcttcagtaaagagacttttgccgaagaaagcaattttagaaaaaaaaaaaaaaaaaaaagaaagcaattttaggttagtttgtgtagtagccagggaaatgtactgaaaggggtggaccatgtttctgttgtgcagataacctacatactgctttagaaatgtgtgatttccagcgtgtgctaaaataagaagtggttgtttgatttatctcccacaatggtatggcattctcttcctaagtggcatttcattcgcaagccaggcactgtaaatttgaactgaatatgtaagtaaatatccctcaaggagatagcacactggctggcctcgtctgagaatacggctgctaaaaatgaagctcttggcttgtggaaaaggctcagcacctgaaatacattagcatccaaaagagtgcatggtgtgctagccagccaaacaaatcgaaagtttgtctgagctataattgtggagcgttgcctacaaagaaagtaatatttgggttgtacctcctacatttgccctcaagcactcaaactgacatttaacccgctggaattttgctttgaactttcttgtttgggtacatcacctcagtgcatggcagcttggtacatcatagcttttactatagcatctttgcatggcagggacaaagacagtaacagtgttttatcaagccctaacaagattgctgcagtgcataattgttaaagggctgtcgatctactcatgtgcaacaggcaagaagcttaaagaatggagaaaacccataatcgcagagtaacttgtattctgatttattatttatcacatcacggttaaaacaatttcctagttttgtgtatttttaatattgacattgaattttcacctaatgcaaaggcaggtttcagaaactttttaaacatttatatatgcaggtagttaagggggaaaatcccttttttattaagatacagaatgcatgtttatcaaaattcatctcagattccatttagaaatatagatatcttgggtttgaaagagcttactgagctgcacggaatgacagatattactgacagaacaaagttatgaatgataaaagaacccaggaaatgcttatactcatgtggctataaattaagtagtagaagaaagattgctatttgttggctggcatagaacaagcattaagttggtaaatgtggaagacaacactcagtgtacatcttgcttcatggagaggtactgaacctcctctgtggcccagtcctgcgtggctgatggcctgtgaacccagcactcccacggggctctcactgtcataatgcagacatggcactccagcaggccccaggcagtagcacaggagtgctgcacagagatcctagctgaaaaagttatagtattctagaacaattgagcattgtaaatgctggtttatgcttcaaaatgttacatttcactgctatgagtaacatctgtcaaagccacctaatgttaagacatggctgagtaatattacctttgttttgagcacaataagcagctccctggaataactggtgcagtccagcccctctggaaatcctactggctgatgcccacagcacactgaatgctggcgggtaaggctgcctttgcacaccttcgtaactcatctcttaccacggtggttctcaaacttcaggaggcctcagaatcatctggaaggcttattaagacattgttgggccccacttctacggtttctgacgcattcaacccgaaaggacacccaagagtttgcatttctaacaagcttcctcatgatgtgaggctgtggtccaggaatgaccactggggactactgtcctcctaattgagctacatggttaccaattatccatttcattgattaacaaaccacctcaaagaaaagacctgagaggggaggggtggtgagaaaagacctggactttacaccaaaagattaaatgaatgtacagccatatattttaagtcaaaatgtttatggcatgtgtgtatctctttttatgatttcccaccataagtcattcttttggattaacccagtgaactactggtcccaaatacagattagacaacctgtattgtagaagtagtgtttgtgtttacaacacaggtaggtgtattcaatggtggagacagggaaacttttccatgattttatgagggatgaacactggagcacgtaaaaatatgagaaatacataccaaaagcgttttctgtgtggatagaggcagggctaaatagctgagtaatgaaaagctagaatataaaggaaatacaacagcaagaatgcactgcccaaggttcccagatttggcatagcctgtatcttatagaccagaagccagaggcccaggaagactaagggccagatactggtctaggcactggagaaaccaccatgaacacaacacccaggttccttctctcttacaggttaaagtcacttctttcctttcctcatgagaaaaggggaaatttcagtattggtattgaattcctaaaaatagggagatgttatgattccttggttttaaaaacaggcaggcagaaaactgttttcctgatgtaagtgtgtatattcaagaaggggaggggcatgtggtaggtgggaggcagtccagtaaacaatatttcgagagcaaacatagcctagtgaatgccttatatttttcttaatgctaacagacttttcattcctaatataatggtttgcgtgtgtgcgtgtgtcccaccaaagagatggagaaatactgtggtgttgttcacttaccttcatggcacccttgtttagtaaatggggtcaggcagtagactctccttccccattcccaccccattccagcttgttctcttgtgtaggtgtggaaagaaggatagtaagagaaatcatcatgattgtcatatgatagctgctgtttattgaatccttataatgtcaaacagcacgttcattgtctcgtttcatcctcgcatcagttacaatggttcttaatatttccatttttatagatgacaaaatggaggcttaggttaaataacttactcaaggtcacaaagcttatacaagttgaaacaggatttgagtctagctccatctggttccaccaccagagctctcatcatcagcacaaatatccttgtacaggagcttttgttgtgttcatggaaaaactaggtctctgaaaccttcatttttgcagagaatgtttttctgtggtcttgagatagggtacacctgtccttggttgctacaatagatgacagagatggaagtgactattttagaactgaatgtgccatccattagcccacagaaaggaaacatttttgaatgtttgttttttctaattgtgtgtgttaagtaaagtgattggacaaacagttctctcctgcttggtaatctgttataaatcaaccttcagatgttaataaaacaagtcaagactgacaaaggaagttccgtttgtattttaaactcccaattcatcagggtctcctcctttagatcttctgtgagagtgtccttggtcttaatgtagctggaagataaaatgcagataaaagagccattgtctcagaagagcattaataaaaaatgaatgttgatcctaattgagtagtatttaaacatacggggtggaggcagcagtctgcagggagcatctgagtctgttagaatttgactctcgatctcatcttcctcctcttattacagggacctcaccacccagctgccttctgtgaatgtaaactgtcacactggaatcagaaaagatatatatagacatagtactatagcagattctcagctcttttgctatcgttgttcttattttgaaacaacgtactactattcctctatcttttcctaaaaatcttgtcataaaatgttcaattaactcattttctgttcttcccttttcattgtttgcctgtttctgtttacagtggttcttgataacttagttttaagttctccttaattcttaattctgttatgctggatataacagaaagaactcgcaatggtcaaaggtgaaagaatttgaacaaaaatattagtaatgatagtattggattataaaccaaagaacaaaataaatatccatgagtccatactgatataattaaattactgaataaataaatgggaggaaagacaaatgtcttccttacagaagaatttcaatttaaggagtgaaagaaataaaaatgttaccacttgaacactgaagtaatttctgcagacaagatccactagtggatgctaaaattaacaagtgaaagtttaaggagaaacatgatagtttcacagcctccaagtattttcccccaaatatttattaattcctctggtggttttaacatacacatatatctacaaattctttaatactgctccctcttaggagatgaggataaattcccctcattgtgaggatgagctggatgtcagtgactccaattccaatgaacagactctggaaaggtaaaagtcataatttttcagtggagaaacctggcatacatcaccttgaccgatggatcaaggttaatgtcaccaatagtaagactttgacgtcatgtacctcatgatatgatgcaatgaaggggcgcgtcgcctccgtggcattcttccccaaattcataacctcggtgttatcatgagaaagcatgaaacaaacccagattgagggacagtctacaaaatagctgaccggtactcttcaaactgtcacaatcatgcagtgttgtaccaacattcatctcttagtttttgtaactgtaccacagctaaataagatgttaacattaggagaaggtggatgaagaaggctttatgataactttttgcattatttttgcaacttttctgtaagcctttaggtatttcaaaataaaatgtttaaagaaaaaaaaaaagacccatcaagggcatagaaaagcttaggtgaagaaaccctaaaatgaatcctcatttatcaactcattcatttattgattcatttgttcattcatttgttcactcaagaagtatttgttgccagacacagtaccaacaaagaaaataagcatccactacggctttgcagagcttggtacgcaatgcctggttcagaggagatatttgttcatcgcttgcttttaactgtatcacagcctagggtggcatgcagaggtttgaataagtgctgaaacaggacaagtgaggtgcttatggaaacacacaggagaggcacttaacctagtcgtgggagaccacaaaaggctccctgatcagcctttgtaatataagtaagcctattgtttaatctttcatttaaagtgtgttcagtgttttctatgggacgaacatacttatgacttacattttgaagttgatttcatccttttagattctaaatgccttgaaagtgagtgctttaaaagtaagaatagcataagttgtttatatgtatccataaaatcctagttggtaacacagagtttttataaggagtaaaggggtctcaaatccctttgggttggaatcatttgttactttgagttttccttagcaggaaaaaaaaaaaaaagacaaaaaaagtgtgacacaaaatatatacatgctgctgtgatttaaaaaaactgaatcgtaaaaatatcttcggtggctcacgcctgtaatcccagcactttgggaggccgaggtgggcagatgacgaggtcaggagatcgagaccatcctggctaacatggtgaaaccccgtctctactaaaaatacaaaaaattagtcaggtgtggtggcacgtgcctgtaatcccagctactcaggaggctgaggcaggagaattgcttgaacccaggaggtggaggttgcagtgagccgagattgaaccactgcactccagcctgggcaacagagtgagactctgtcaaaaaaaaaaaaaaatcttattggagtgcatgaaatttttgatgttaaaaagatgttttctaaataggctgaaacaagaacaaatatttttacaaaagtcttttcaatgtaacattttcagaaaaagaaacttagaaacaatgtaaatataaaacaaaaaggagacagtgaaatgacttctcgtattcctatatgacggacacataagatagtaattaaaattacagaatttatgtagatgtgcacattgcacacatacaccccttcaacatatgaaaatgaaaaaggaatacactaaaatattaatccttatctcagagttatgggattgtgggatttgtttatactactttgttttactttttctaccatgactatataatttttataattagaatgaaattgccctgtgttaatttttgagagaggcattaattctaagaagtagtggtacagaggtcctgggactcttaatgtatgggttcagtaacagatgctctaattgaaatgagaatcagagctcaggaaagctagtctaggtctccctgtgtagctaaataataatttcatgttagcattatttttgtataccatttctcaatatgtttttaaataacatttttgatggttttatataggaagaaacattgtgcccataataggtgtaccctcatgacatttagcctacctcatggtaggctctcttacagcttgtaagtctcaggcattgagaagcacttggcctatgtaacaagtgggtagactctacattgcaaattcccaaaaaggtacctaccaaaggtctgattaagagcacctggaggtaggatgggcatggtggctcatacctgtaatcccagcactttgggaggctgaggcgggcggatcatgaggtcagaagatcaagaccatcctggctaacacggtgaaaccccgtctccactaaaaaaatacaaaaaattagccgggggtggtggcaggcgcctgtagtcccagctactcgggaggctgaggcaggagaatggagtgaacctgggaggcggagcttgcagtgagccaagatcgtgccactgcactccagcctgggcaacagagcgagaccccgtctgaaaaaaataaataaaataaataaataaaaatttaaaaaaagcacttaggaatctttttcttaaaattgattatgactcagtaaacaagcacagcccctcatcaatcagtgtcggtcattctcatgtagccatttgacctaatgtcttgttagcaattatacctcctcattattctgaaaactggccaggcctcggccattcaggccaccaggcacaaagatagagaggcccactggccacatattacctgatacagtatgatacaaccattgagagttctgttacatccagcgtacaaccaatatgtatgatgtgacatattacctgatacaaaccacggaagggaaccatttcttagagtgttgagctctacctgtcttactctctgcacattggatcattagagactgtcctgggactaatccagagaggtcaatctaagcacattaaaacaaaagggtggccgggcatggtggctcatgcctgtaatcccaacactttgggaagccaagctaggaggatttcttgagtccaggagtttgagaccagcctgggcaacatagacagaccccgtctctaaacaaaattaaaagtaaaaaaattaggcatggtggcatgtgcctatagtcccagctactcaggaggctgaggcaggaggattgcttgagcccagagagttcaaggctccagtgagctatgatagcacctctgcacttcagctggggtgacccagtgagacgctgtcaaaaaaacaaaaaacaaaaacagagagggttaagagccattatctcagagatggagacaggactgagcaaaggagaaggctagagctaaagtgaaatgaggtgggaagggcatggagccaggagttacagagggagaaaacgatgctgaagagttcaggatgagatctttagatggcaggatttctgcttggacagtgtttggaggaaagctccttctttagctcctcttgggctataccgaacgttaaggaagtagactcctaacagagaggtagagaccgtagctctgctttcatctgtagattaagcacctctttcctttaaaaaaaacaaaaagttggctggacatggtggctcccacctgtaatcctggcatttcaggaggccgaggcgggtggatcacctgagctcaggagtttgagaccagcctggccaacatggcgaaaacccatctctactaaatctataaaaattagctgggggtggtggcgtgtgcctgtaatcccagccacttggggggctgaggcaagaggatcacttaaacctgggaggcagaggttgcggtgagccgagatggcaccactgtgctccagcctgggcaaccaagcaagactctgtctcaaaaaaaaaaaaaaaaaaaaaaaagttaagactgggtgcggtggcgcacgcctgtaattccagcactttgggagcctgaggtgggcagatcacttgaggccaggagttcgagaccagcctggccaacattgtgaaactctgtctccactaaaactacaaaaattagctgggcgtggtggcacgcttctatagtcccagctacttgggaggctgaggtaggagaatcgcttgaacctggggagcagaggttgtagtaagccaagatcataccactgtactccagccatggtgacagagcaagactccatctaaaaaaaaaaagttggaaagttaacatttttctctttttcatgttctttaaaaaaattaaaagctttctagggcacctatgactaccatttgtttttctttatgctttgagctacaatcatctaaaaataaaaatgattgtgcttcttatcttcattttcccctaaagtaggactcttcctatttgaaagatggttggaggaaaggaaaagtatatgtgaactgctacatctccttagatttgagagacggagggagaaaaggaaaccttagatttctttagtacttgctccaaagaactcagatatcttattgatcttggtaacacgttataataaaagtagagttttagcttcttggttttggctgccagtgtccatgacaaggttcaccaaagatggttttggactctgggcctggctctaagctatagggcccaaatcttagacagttgagatccaacaaagctgggttctggagtaggtcgggaaacagagctggtggcagagtgcatctcggagttccctctttgacctgttcacaggcctttcattgagccttgtttgccatgcttttcttgtggtttgtgacagataagaactgtattgattcctagcatctgctggcagtaacctttgaaagggcaggcgatgcatcaccacagaattttatctatcaatatcggagtaatagaaagacagggatgacatctaatcacaacacagctggcagatcataaatctgagctgatacggtactagtaatgggcagcagaaaaaaagggacatggattaacattcggataaagtcagggggtcgtttacatggaaaggacacgatctggccatgagaaaagtcctcatggaaatgatcaccctcagaggcctgagaagttaagtaaccttcccaagtttatccggttagtctgtggaagagccctgctgtaagcctcagtttcctcatctataaaataggcaaatactttgatggttggtaaaggattcaattagattacgtatgccaattctcagagcatagaccctggatcagcagtgtcagcatcacctgtgagcttactaggcatgcaaacgcctgggccccacctcgcacctgctgaatctgaaaccctgggaagggcccagcagacaggccctccaggtgatgctgatgcatgtgacaacgtttgagaatgcagatgtatgcaaaacaaccaacaaacacccttaaaagggtggcctggcatagagctaaggttcaaagcagcagcatttaactgctgcttttattactattaatattacttggtcctgtcatttatactaataatttactctgtgtacaagccctacattcttcatacttttttcattcactggtgaattagtgataaaaataaacattttctgacagataaacatttttgacatttaaaagatgtcatagaactggatacactaactcctatgctcctctggttacagtgctagagaataccagcattctaaaggttaaggttctaatgtgtgctttggacatatttagtgcttttgacatgtcaggaagcttccagtctggacagtgaatagtgctacaatttaataacataaatggagtctgtctgattctgcaaagaaatggccttccttggggcccagaatatatagttccttctgcagttacactcacagtatttttaatcatttcatgattttattatatcccaagtataaggtgctacaaagagtccctggtgctggcagtcactcaaaaattggcaaatctaaaaagtgaatagaacagcaagtagcccattagattatttttttctttattaaaaaaaaacttttttaaaaagaaaaactaccgtataaagttggaagtgttgattttggcatcttatacatgaaaagtagtcgtaataaagtgcctcaattgttggtgcttgttctgcagaaattatggctgtgcacaattgtgagggcttaactgggtttccaggaagtacgtaattcacactctaaatgtgacaagcatgactgcccataaacctaacgacttttttaagagaccaaaattcagaatgttattctctctgaaactgcacttagtaacccagcagaaaactgttcagagatctgctcccattgcaatgaaggcatctggacataccagtggtaagaacagctaacagctttcatataagaacaaactttttagaggaaggagtaagtgtgaacctattgcaattgccatatgttaaggaacacaaacaataggaactagaacatggcaatggccattttgttgctggctctctctccctgcccacctccaaccagaaaaaaagtttactggaaaactgaaacaaattgaagtcctaggtatataaattttcagagtgataggaaagaacctcccccacactgagcctttcactctgaggtgaattctctggtttcaaggtaagtgttacttccccctgtgagcagctgctaacgatgctgttagcctatatccggatggcacaaggcacgctgactccagtgactgagaacagggccagcagtccaggctgatccatggatattcattaagaggctgtgtgaaatgaaactggtgtttactttttcttctcctggacattctatgaggctcattccaagcctgattctttctgcctcaagcttaagactcttgttatttctcttaaactttggtttatgctgttacctatatttttacagcaatttttatctgctagccagagtgaaaaggcctgttgtaatgggtaagatagcttttatttttttcctgccttcaaatcatatagctgaatttcatcacttctataacaaacctctgcagcctcttttcagttttcattttggaacacttgctttatttctctatttgctgtttttgtcttcactggcctaatgctcacaaacacaaaacacacagtaacaataaaaccaagtaagcaaaaattcagctagggtgctaccgcttgtgaactgacagaccccactaagggtgagagcgctggctagaagtagtcatttttgcaattaagtgcagaataatctatttgcattggttacagtcagctagctgctttgggagaggatttttcatttgtgcattggttgttgttatttttcatctgtgcattgctcgttgtttgcaacttaaggaagaatgatacattcagtttcctattgattttatccatgagccacatcaatttatcttcctgcaaccttgaatttttaaaaatttgtttttaaacatgtttattcctggaaactggcctaatttggtggctaggattcatgatcttctttatcccattacaccaagattcaccagtttcctcaaaacaagttatctaggaatatttctctttctaggatctcctttggtttagctgttagtcttgtgtttatgactgtgatataaaagaatgattggaattaatatactccaggccagcgctcctcaaattaatatgcataggaattatctgagtctcttgttaaaatgcactttctgacttagtaggtctcgtgtgagtttgagattctgcatttttagtaatctcccagggattgtcaagactgctggtcaacaacactgcatagcaaagctctgaggggactggtggacaggtgtcctaattatatttttggtacaattgggtgctacggaaaaccctcttgagtcatattgcagaatgtatgtgtcctttgccctttaacttctgaaattagctctttgctggtctttccttagaaggcagctagaccttaactgacgtttatagaggcaagtaacgctcatttcttcctttaaaaggggaacactgatgccaaagcccgtgcgcctgacctctgaagtattctcgactcctgctcactctcttttccttctcctgagttctgcttcctcttctctatactcttttccctgactcttatcagctcctgagcactctgtggcagtctcttaactgatcctcctgactccagcccttttcctcctcagcctcccatccctctctacatagaaggtatctttcaaaatacaggtgtaatcattccctggattaaaatcacttaatggccccctattgattacaagatacagtgcaaattccctagcctggcatgcaatgtcattcaatatctggacctaatgacctttccagaaaacgttccttcttgtctctattcagagcacactgtatttttcatattgttccaaatatgccacgatcctcctttcagatttcctctccttcttccccctctctagaagctgcacccttatcccaactgagctggtcatccttttctatggtacccatagcatattagtaacttgtgacttacaagtatgcgtttgttgtctctgtgtgtgtgtgtgtgtgtgtgtgtgtgtgtgtgtgtgtgtgtgtttgtctcccttgcgcattaggaacttcttaaagtagggctgttttctctattagcactctaggtccaatactaaggcctgtttccttccaagagtcttgtgaaaatccccgagatatcgaaaagtattggcttcaaaataaaatatacaattggaaataattttgaaagcaaaaaccctttgaaaattttaattcaaaattatatttagtgtgagatatggatgatacttaataagtcttgatgttatatggaccagttacttcaaaaagtgagagcgcctagcacccatgaagtcttaaaacagcttatcatttagtaattttattcaataaacatttattaacattcgccctcttagccaatactgtattatgctttcgagatacaaagatgattaagatagtgtgactgctctcaaggagctcaagataattaaaataacaatatatatttttggcacacaggttttgtgtcaagactcaagctgtacaaatatgtggattatctcatttgcacctcaagataacctagcaagggaggtatttcatacccattattatgtgtgagaatcctgaggcttaagagagtttaactttcccaaggtctgcctaataactggcagagctaggattgaacccagatcaaaatcaaatgaaggaaataaccctataaacaaataatcacagagctatccatgtaatgagtactgagactgagacacataacgatttgtgtgagttagacatcaagaaacctgggcagtcatcagagctctcttcatggagaaagctgatggctttgagctcaatcctacaggacaagtaggaattcctccatggtcagttttccgctgtgatgagtagattagtaataggtgggtttgattaagcaataaattaagaaattatgtcagtaactactgtcagtcatcaattacatattgatttgcttcctacattcaagggtatatttttacctaagaatatctattagtgtcattgtatagttatcaaactaaacaaaatattattattcaattaaattttgtctgtgcaacttttctttgtttgatgtcaaatgaaaggggaaaattatgtcccgtgatgccataggagcacaccacttagtgaaggttaggtttccagacaccccaaacatcttagacatacccaggaactcattagaaagcaggaaaggtctcaatacctgatagctttctcaaagctcatgcacttagtcctaaaggcaggaattatctgtgagatgtgacagccagcattcgagggaaacagcagaggacacgtgcaagccgaacaggctaagactgtttagggccagcttgtccaacctgcagcccacagaccatatacagcccaggacagctttgaatgtagcctaacacaaatttgtaaactttcttaaaacgttatgagatgtgtgtgtgtgttgtttgtttgtttgtttaaccttatcaggggtcatcagtgttagtgtattttatgtgtgacccaagacaattctttttccagtgaggcccagggaagccaaaagattggacacccccggcttagaggaaggccaagtattcgtgcatatttcagtaactcatggatgtcctccctgtatagaagcatagaacagagaaaattggaagacagcaagcttttgtgcaatttgtcatttatttcattttgtcttagtctcagtgtttaaagagaggtttagttatatggaaagctgacttttgtgaaacaccgtattccctcaagatgtttggcatctgaaatattgatttttttttttaggttttacagggagaagggtgcattgcattatcagcctaacactaggcacccttcacaccctttgaatatggtgattgctctctgaactacttatgggcttatacagaaagggaggaaacccagacgataagtcatgtttttaatgctgtagattgcaattccaaatgtctggtcctctgccctcatctgctatttaccttatatgtttcatacttgtggtttttaatttgcaattcaatataaatgtttgataaagatattttaatttgctctctgctttttagttagccttagaattaaaacaattatagctaaacctctgaaataaaaaaaaattcagcagattatggaagatcataagaaggtcctaataaaatagacagagagtgcatagatggtggtgatgctgatgaagaatatggaagagaaggtcatagttctctatttagcatttttggagcttaaatactttcataggcattacttcactcaattctcataataatccttttggagagataacatttatccattttaaaatatagaaacattcagaatttcagaggttttcctgttttcaccaccagtaagctcagaactacaacaaaaattcctgttttccaagtgcgatggtctcatttcttcttagctgccccctattagtgaaaaataagtcataggtaatgttcttctcacttatctctaatttcagtgatgattaatcagcagcccacacctagatgatactaatcaagttattgttataatggcaccagtttgtgtagttactgtgcataattgtctgacataggctttgcactggggagtcagcaggcagaagagtagaatctggaatctctttggtccactgacttctctccacatgcaattccttcatcaaactgtggcttaaaagagctttctacctctattatacgtcttcccaggttgagctgggaccagcaactgaggaaaccagttttaaaaactaataaacaaacaaaaaaccactagcacttgctttatgattgacagatgatagagtgaataactcagcaataagggccttagtcatggaccccagttttccagctaagaaattgtcatttcatataatagttcaaagctgcttggcttcctggtaggagatgtggataagctgaatgttgcagcattattcagcatgatgattatcatggatttacagctgtttcttgaacaaaccatattacacacactcacagaatacactctagaataagaatataaaacacctctcccctccgtcagttgaaactgacattcactctgagtccatatctgatgtgttccaactgatatccttacttgcttgtcctgtcggctctaagctttaaatttggaaggttttcaatgactcttgttggcaggaaaaatgaatgaggaggtgtagagagagactgctattacagccacatttcagccacgtagactgtcaatactaatgaatgcccttgaggcaggtactgtaaatgccgttaagttggagttgagctgcctttcgagtttgggtcctttggcagaacagacatctcctctctaaatactaaagaccctgttgtagagctaattttatcagtatcacatattggaacatgctggttgctgatagattggctgtttggcttcagattccttgatatgctgagaatgttactttagttttgttcctgagttataaaaatgagatactataaattcattcattagttctccttcattcttttagcatcgtaaagcttattgtcctttcagctaccttattaatatagtataattgttaatagcacccaatctagagttaaacagacctggattcagatattggttccaaccacttattcagtatatgtaaatcttagcttccttgtctgtgtaatggagatgataatgggatattgaaccacataagattgttgtgaggtttaaattagataatgtgaagaaagggaaaaaaaagaagcatagcgccttgcatagaaaacattttaaaaatacattagctattgttatcatgcagatgattaaaagaatatcctcctccagatagcagtgagagttttcttaatattagaaaaattaataataagtgctttggaaaataaataatttgtttttcttgcctctatacatgtggagaatagcagccactttccttttcttctctttatgtagtaattattgttacccgttacagtcttatgattttaaatatcttacactagttgttaatcttttaacaccctggagacaaatgtaaagggggaaaaacccagcttttagtgagctgaagtgaaaagtgacccaagtttaatcacagtacctcttaacaaagagaaaatcatattaaattgggtacttaaaattaggatatataaaataagggaaatacatatgttatctccattgagacttgaggatgaggttgtaaagaaattcaatttaaataattttataaagaataactggtaagggtgggcacagtggctcatgcttgtaatcccagcactttgcgaggctgaggcaggcagatcacgaggtcaggagatcgagaccatcctggctaacacagtgaaacctcatctctactaaaaatacaaaaaattagccagggtggtggcgggcgcctgtagtcccagctacttgggaggctgaggcaggagaatggtgtgaacccgggaggcggagcttgcagtgagccgagatcgcactactgcactgcagcctgggcaacagagggagactctgtctcaaagaataactagtaatggcaagtattgtgaacagcctacatctctgatatacttacgactcagggggattgagaagtatccattaaagtagaagagaccacagtagggtcacccatccccatagctttgaaatcctaaatttttccttaatttggttagggaaagccaatgttatattttttacagagtaagagctcaccagaggctgctgcagtatatataataagtagtttggctactaagatctcttctggggtaaaagagaaatctaagttcccttagattttgtaggaacagtagaacctaatatttgtatcttcctttgtggttttcaaatatgtgttttgagttttaatccagtaaaccttttgttttagttgtgaatagcttgtgttttgggaaatgtagatagttctatattgaattaaatcagtcgcttcctattatcccagacttcaactaactttggggcctgtgaccaacaacaccagatgaagtgagggtttgtgctttatcagctatcagctgctatttacacagttcatcccttttaaaagaatgtgagtttccttctcaatagtccatgcttgtcaacagtggaattttgtgtaaccggttttcactctagaaagcagtcacttaatgtttcctagagtataatatcatattataagttcattagcaaagtggttgatacagaagatcaacaattggccttcagcacaactccattttgtctaaaagaaacttcatatgttttgaaatgctggaataccacccagctttgaattgctactaaagcagctcaatctaaaactattcttttattctttttttgccataaacgagcatcacagaatcaaatccattgagaagaaactgcttgctttgccaacacaattagtttcataagaagcctctgccttcagattgttcttctccaaagtccacgtttgttggatggctgcagttattgtttaattaatattttttaagagccccccttctcccaagggcctctaagcagatttagcaggcttaaaatgactcttccacaaggtgatttcaatgccatctcacaaacaaatgaaatagtggcttttctactttgggggctcgatttttttctctctcttttagttctcataaaacctgtccactagagagagtttttcttcagggttatcctatcttctctctaaaaaagatgctatcttgcttatgaacgaaaagcccatgcaacctatccagctatgaaaagaagtgagagaaaaaagtctcaggttttcacctaccagtgtgcaaagcaaaaggattcaatgattattattatcttttatggtttatttttatattcctgtttctttttttgccattagcttctttgataagtgaattttaatggaaaagctaattcagatcttcaagtttagtggatgggtgtcactccgcataaacattctatagagagaattgcacctcttccttttatgggatcagatagctcagaccttcagcgtcgtaattgtttggcacttttagtgatgtgggccctgattaaaaagtcatattgagctcagtcttttaaagggaaggcagctaatgtgatggttgaaattgtaatagtacaggcagggatgctataactattttcttttgtcacagtcttccttgaaaagagttttcacccatctaatcagtgttttctttcacaagagatacccatcctgtatgtaaatagaagttggactgtgcttgacctccgttcttcagccttaatgtcaaaaaccaatacacacaaaggtagaaatggtttgatgcatattagtctttgaagtcaagactctggtcacctttggtttggcatggtgtaggagatcattctcttgggagagaaaagcagaaataactcttcttgcagctgatgttaaagaatttcatggggacaaaagaaactttacataattctttccaataacttttttcctaatttacataattctttccagtaagtgttttaaaacctgactactttccagtgtgtaagttgagggcggaattgtcaaaaatctattcactaggtaagttttgttggccttatagctgtggaaaacccagtctggggactctgaaggagaaaccttgctgtgctatttcagagctgcctctccccaaaggaatttcagaatataagggacactagaagacatgaggtttgagaaaatgggtcttcatgttatttgctgtggttgctgttgagttagaccctgagtggaatgcattgtggtgagccaccaccctaagcatcagtattcttggctattctcccttcatgtgcattttggacttaaaggtgaaattccatctttaacccccttgtggttgtctgaacaatgattaatgaactagatgtgattccctgcagacctttcaaagggtggatgaaggatggaatttcagccttttttttaaaccaggccttttgcttaatactgcttttaaaattaatgtcctcctttgaatgccaagaaaacaaaaggaatttctcaaaagtgtatgcagcttgacacaatagaccttaattggtgtcaaggagatgttaggatgaatgggaaaatgcccaataagactgaaaagtggaaccttgttatgagctgtcatttcaacgtgtatttaaactatagcaaaactgaaacatatttgccatatagatcataatgactccaaaggagccattatactctattatgtaattacataatcaaaccatgcatagtaatcagcttttggaattcaatgctaatcaaacatacctatagtatgtgtttaagcgaaaatagagaacgttaatttgccattagtcagctaaacaagaacgtgtatacagaatattcatgaatagcttaatgttgtgtcagatgatattttttgttgtgtattcaggggaaatcaacaattttaattgaagaaaaatccagcacagaggaggattactcttaaacttgccattcaaaaatttgcctcacctgttactgattataaaatgttaaattaaataaaatatttttccttttataagctcaagtgacacaacagtaattatatagcagaagattcttttgagatcctgaccatctccatgccataggatacagtgttataaatgctacataaaataaaactgtcaaaacaacaacaacaaaagcctttgagcacatattgcttttgtaattagcaatgaatcaaaggtgttatctagaaagagccaagaatagaaatatcttgatgacttggtcagggggtctggcatctactcgtggctgggcctcatgcttgtcatatgatttcaggcctatctgctccctgggcctaaagtgagagagttgatctccaaatttctttctactcagttctattgattctggattccatagggttctataaaaaacaaggtgatacagatgaagtgtttgggtcaatgtcacatattcttgttcactccattatttgttgagttggtttagtttattttatctctaagcctgtgaactgtatggttggcattcataattattttcaccattaagtagacagtctttggagcagacaatcaacatatttgacttaactgtttggtgtaacaagacatggagaggatcaaaaaggttaagaggggctttgtaaacagcagacagattgattgcttttgattttagataaatactaaagtattcatgcaggttgatatttgcctgtctcagaaataaagaattgcatttgtcttgaagaggtcacacccttaaccttaaatctacagttgatgggcccctctctttggaccctggttctcactgtctcttgtctgcacattggatgcctaaaaatgttactgtaatatttaaatagaactaaattctttcatcaaacgctttcgtggcttgaacttcgaataatttattttcaaattacttttactgtaattcttattaattcaaataggtttctgatttgatataaaactctgtaaatgcagggaacagtttaatgaattgaaagataggattgagtcttttaaaggaaatgtacaaaatatgctgacaataattgcttagatagaaatcaaatcttaatggctttgttaatgatttgtagtgaacactgtgtttacgttgacttgggggaacatacgtagttagaaagatttttccctctgggtttcagcagaatcttaatttttttcattcttttcctgaacgtactcaactctgtactagctctcagaaacgttagcaggaattgcagtgcctctactagtgatggttttatttcgggtagggattagaggttcttcttccaagttgggcccaccctgaacagggttgtaaaaatagtatccaacagaaatgagcataattgacaagtcatttgaagcttcaagtcagcgaaggctcacacatctaaagaaaataagttttccaaaacatgcttctttgaaaatttccaacctaggagggtaggaatgaataaccctgagcctttcatttgtgtaaaatttcaagaactatagtagagtttttaaagtagtaacttactatattgattagcagaatgttttttttttaacaatcaatagttttggtttgactcctatttagacaatatgtgctgatttaatgttaggttcagtcttccatagagcagaaggttttcctaatatgattagttttcctaatatgattttgctacaagggactgtatttgccctttctctgggcaaactgtcttccctgtgaagagtcgctggtgctccttctctatgtcagtaacagtttacgtagttgccatagtataaactcaattctgttttaactatgacttgcccttttattatagtcttgactagagagactcccccggtgtaaatgaagtgctttattgatgaacagccaggcagcgggggcgagagcttgtggtgctggcaaaaggccgccatgcactggtaataaaggctttctctaggggcagagtgccgagcactgaaagaaggaagcagtagtaaacaaggtcttttacattcaggacagtttctctctcatcttaaagtgtgtaattgtgttctggataaaatatggaaataaaaaaaatcagaagttgctcataggcaaacaaccctctttaaaaacaagtacattttccaaggcagagccagtatgaaccttggcatcaaagcctgatgctggctggtaaagagtgcaagctgtgtgggccggagaatctgatagaaccgggttcaagcatcagcttggccacttagctgaatgacatcaggcagtttatttaaatcgctctgtctcaggtttttcatctctaaagcggggatactgaaaactccaggagtttgagagagaaaagtatgtaaagcatcctgcacagtgcccagccctggataaacatttgttcccttcctcatgtctcatttaagatttgccttgtcacctccctacggtggccatattgttgactgaatagattccaatccaggcaagtgttttatgtaatgtcactgaaatggagtttataacaaaatgaggttttaggaaagcatttgtaaactatgttaattgaagattgaattagtaggggatttatgtgcccgctgcacccccaccccaacaactctgctatcatggtcattactaatcataaaaatatattttatctttctttagacaataagctttctcttcattgtgatgagtgccctaacaacttctagtttactacaggaagcttgattgtaagcgaatgggactctccagtgccatagttttatttttaggaatcgtctggcaaatcggggagttatagggaatatagttgctgatacaaataaaaatccagttggattctgtcttctaaacctcacccatatacaccgattagtctataaatgccagatattgttccacccttaaaataaatcaccttcctgttaacagccttatttaatggctacagtatgttgtacctatttgatttcttttgcccagaacatgtcctgtttctgccttgacattatatctgctaattgagttttagaaaatcagaaaggttttaaaaatggattcttgaagaaaggcaccaaagttgcctgtttgtacccttctgctacacatcaaattgtgttttgtagctacctaattgtcatgatatctatttcaaggggaaatttatcaagtcacagtgcactcttctgtttggaagaaatatttgaggatgtgagcagaaattatttttacataaaggcttcaggcagttaagagtactgacatacataccgtattttcatcactgtcattcacttcctttgcctcaaataaataggtcattattattcctttgcagccatcttatggtgccttaaagtgtggagctctgtgtaacataactgccgtccagctgacccatataatttattggtgatatttacagaatgacatccttgggccaccaccatcagacaaggccctttgatatctttcagcaaaatatttcatgatcacttataattttttagcattagtattataaccatgttaacatagctaggaattggcattttctgagacactggattttaggttagccttagcaattttagaaaataatacagtcatgatgatgataccaccatgggtttgcagagcgcattatgtgccagagcacagcaagggcaaacatttgcagatggaaaaattttacctgaatgattcactcagtagtgacacattaaaatagtctggccttatagtactcaattataagtgattaagaatgtttctagaaaacaaacaaaacctcactctgttttattgttgtcattgcttaaaagacaaaatcatggacaacatgcctcttttcccatcccctatatacatgttctgtagccttaatatgagtggagtattctactctcagaatatgctagccttaggatttcaataaagagctaaaattaaagcatacagttatttccacaggaactattctgttaaagcataattgaattgcaactggctttaagtcccagtggctgcaagatagtagtcaggatttgtaaggccttggtttatgttgaaaggattaatgcccgtcaccaggcctttccacatgtaccttttgtaaactgaagattatttatgttgctaatatacttcctttgatagaagaaatccctcccataacccagtaagaccgtgtttggtattcttgtctactcaaagcaagtcctatgccttaagacagttatagcccttgaatcacacaattaaattttttcttaattttcttagtagatcgcgcattacctgaggctgtgagagtggtagcttttctgtacacacttttgccagggccagcaaaaccaccttgaaaacctcacttgattggtagaaattttcttctcctttttcttttctccaatctgggaataaactttctccagctgggttctgaattctgtgtttgtcacagtaatgcactaaggaaaaaataagcatctgttcatttttttttttttttttttctgatcaccttttctctttgttgttattctgtaacactgttcggcatactaagcctccactgctggatcaagctttcgggaatttaccctctcactgcaagcccggtgggcctgcattctcacacctgggttaattccctggatcctagagctcgaggttgggtttcattttggtctgctcctcaagcatcagaaatttttgtctatctgtggctctaataattttttttccttatccttttagtttcctcttttctaatcctctgccaggggctggtctatttctaggtggatttggcttagagccatcttagccacccctctcacactttcccagtgtgtcctagcaaaggaaaaaaaaaaaaaaaggatccttcaacagaaatatgatagcaggtagaaaccttccatttattctaattgcatctctatttatactgtctcaaattttctttagatgagtatttatctttgacctttgtttctttatgtgggaacatttttttaaggagcaaataatctgccccgagttggtgtaaaacagctgcatagggaggtccttgagagcaggagccttattcttggatccacactactcccaatgcataatggcttaataaatctttgtatttgatgtctagagaaatgatgacgatgatgatgatagcagcagctgccatttattcacttttatgagaaactagacacagtgctaaatgctttatatttattatcctttttcatccccccatcagccctgtgagatagcttttaattactatccccattcttcagatgggaaactggctcagggactttaattaattttccagagatcacacagctaaaaagcagtctctctctctccccttcccaattgaccattacatctactgcctataccacactttttgttctgtaagtagggataaggtatcggttttcacccacgtggcagcttcttaaaggctaggacaacatatacttctgtatcccctactatgccaggtgtgacattgaacactggagaattacttcatcctttggttctgagttgaactcacttctcctcctacctgtacggtggatcatttaggacatttatgaggtggcccaggctgccgtcactaatcttagaagcaacaaactagggcagatctgaagataatccttatatatcagtgaatctgaaagcctcgactttttgacatgttctgagggagattttctaaatggctggcagggggtggggggtgatttgcagataggggtgtcagttcagagatgcctggggctttgggtgaatcatgaaggtgtgagtttcggagagcagagtaacaaactccgaaccctaagccttcccaggatttcatcgagatcccaaagagtcactcactcacacacgatgaactgcctatacattgggactgtcaacatcaactaacaagacgagattatttattgaaccctcctacctacttctattaagtggctccttgagtttctgtgaggctgaccaaatagcttagctcaagggcaggtaagctaaagttggctgtgtctatcttccctactccatttgtgagagattcagcattcacaaaagctggtactctgacctttccaatacctcctcaatatactactcaactagtacaaagtactagaggctgaaaccttttgtaccacagcttttgagagtatgatgattccaggcttagttgtattttgtcccttgatctgtcttcgattaacagactcgttttgtagactacaaagaaaggtattagagccatgctaaatgttgctacttgtgttcattttctaatatgcctagttcccactttaatagatcccactgatcacattttaattgatggaaattttcctctgaccttttcttccctttttttaaggtgatgggcagaatctgtttacgaaagacgtgacagtgatcgagggagaggttgcgaccatcagttgccaagtcaataagagtgacgactctgtgattcagctactgaatcccaacaggcagaccatttatttcagggacttcaggcgtaagtttccatctctatagttgtagatggcaacttttttacctacatgttgtcttgataaagagattgctaaggccaccttttttaaatttaatgttagatgcttaaagtttagtcagttctttagagggaagaagagacaggcaatcataatctttctacttaatagaaaccttgaatggccccttttaaaagtaaggcagtcttactttgcaatagaaattgattgtagtaattcaaggtgaattgcaatcgagtcccaaatacttagctgacacaaacaactcaacagggtaaggcaaggaaaatacagcattctgaaaggtaatccctttggtttgaagattgaagtttccaaggcaataaatgcctataagcataaaaccaagtcttctctcatcatagcctttggcatatagaagtgtccacatgctgaaatctttccaaatgtaatatcacaaaaaacaaaattgcaatggacttgtatagaatagaaatggttcatatcagtgtcagggcttagtaagagcaagaatcaaatcttttgaaaaaaaaaaaaaccaaaaactgttattggagagcatcggtgcctaaccaaagcgaagcatgtctcttcccagctgcttgtccccttcctccccaatacctcagggtcattcatgacctgtggaaaacgttgataaacctaaggaacatttaaaaggttgaggaaagataaaaggaaataagccagcttcttttcttaaagttaatttttgtcatatactaagttagtctttgccaaaattaagaaaggattttgaaagagaacatttgaactaaataagaggcccacatgtatcagttttgcagtgattttgatttcctgcttaatgcttaatcagtttcatactgtgaagccaaatgtacttaggaaaccacaggaccagtttaaggcctccgtaggctcgaggtcatccacttttggcagctccacctcaaatcacgtcaaatatgttaaggtgcatccaagttgattaggtttattttgctattagattataagtttttaaaataatttttcatgttgcttttgtaattaatatgaaggcttttttagttctgtttcataatttgaaacccttgttttttgaaggccttacttacaatttttgaggcattttaaaaggctgtaggccctagtccctgaacttccagtgcccaaaggctagggggccctggcactccctgcttcaggggactcatgacctgctttttccctttgttttctttttgtctatctctagtataaaacctgaaaacatgtatgagtaagtgctgaaaactgacagcatttggaattgtgccaagttagaagggtgcgtagctgggtgtgtgtgcatatatatatatgtgtgcatatatatatatatgcacacgcacacatacacacacactcacacatacactgatatgtgtaagtttcctttggacaaggttatttgtctacatgaagttactgcaaacacccaaaatagtaagtcaagaagtatcagatacagcaagatgtaataaataattaaggaaaatagactgtccgtccaccttctcacaatcactaactctctgttttgtttcacagctttgaaggacagcaggtttcagttgctgaatttttctagcagtgaactcaaagtatcattgacaaacgtctcaatttctgatgaaggaagatacttttgccagctctataccgatcccccacaggaaagttacaccaccatcacagtcctgggtaagaaacgcatgtggggcttacccggggaaatggaatagagatggcccttttacagcagcaaggaaaaggttaatggtgaattctcctgttcaaacttgtttcaggaagaatcaccgcccatcttgctgaattttaaaaatagcctattttaccaaatgctgtaaggaatggcaatcagcagtctttatagattccacctgctcttgggtttcaaccctcaagcttcagaagcaaagatcaagagaatttagagccctcaaatgaatcactcaccacatgaaatgttattacttctaactaccgggatttttttcttccttgtgtgcaggagaaggggagatgggctaccaaatctataccccatggcagagctcagttatgaaatccacgtaatgatttttccttctgagttacatcctcgttttaatattgttgatctccttttcattggcttgacttacggccttgtttattgcttatactctagattatgctgtaaaaaaatcatactccatgaacatatactttgccacaaattgcagtcattggacataaaagagttaagagcactttaactggtaataagcaaagaactgttgacgggctgctaggtacacctccagtgagctgagtgtcttcatttatgatcaccagattgtgagtttcagcaaaatcctagtagccaggtttccatgttcaattttaatatagtcagcagatatttctatgttgaaggtggtctgaattagtcacctttagacaagcttactctactgcataacaccagctgatttggattcttgaaactgaattttcaaggacatacactatagcatgaggcaagatctctgatttacaccttcgggaagatgatgaatcaaagtctatttgaggcggcagactgcagcttttcagtgtaatgataggaagattaaagaggaaagataaatatgaaggacatttttgcttggtatgtgtgcacatatatgtatttatggatgtacatattgagctgctgcctcattactttacttcaacacagctgtagaagggaaattttttttattcattaagctaaaacataaccctaatgctcacatatatgtttttgacaagaggagtatcaattttagaaagatgtgtttaaaaccagtccatacaatttctaatctggtctgtgtttaatgatagatggctttcacgtattcatatttgtcactattgtggttttactccagattagacctgtagaaatagtaagcatgggaggttttagtgggatgactattttggtattttgcagatgtaccaaattcgcaagcataaatttgaagttttctgtctgtctgcttgtatcagagtatttgaaaatgctctttgcttattggagtaagtcattagcagcatagacttcaaattgactatccactcatccaccctttgactcatcatcgtttatggcatttccacaaaagtgacagtcataaaataaaatctatttatggcattttgaattttcagagtattttactacatatacctttacgtatttatatgttgttttcacagaagtaaaatgataataacagatgttagacatcttgcccaggttacaaagcactcagtaagaaccaaaaatcttagaattcagaataaatcttacaattctgtcttaaaattacaacctttgtgtcttccagtctaggttgttttcagttaaataccgaatgcttttgttttaaatttttttttttcctaaaggcacacatcttttgttttcaggagtatgtctagccattggcaagcagttactactgcctgtcattttctggtgcctgatacatttattctcaaaacaactgctttggatcagtttggctccgaatacaccatgtgcttgggagccagtgtgccagcactagaattttgagaggcattatgcctgtaatccttttggaggtctgattattctagaagtaataggttcctacttgtattttatagaagtattaacttaaatatacttgaaagtagcactttcaagtataaaaagtagtagatattctttctgtagatattattcattcacttaatattctttccatttaatttactctaggattccttgacagagtaaaattgttgtcatcagtgtttgagtccttcattttccaaaatctgacaatttccactgatactcgtatattccaacgtttctcgtaaggtttagagttttcagatattacaatgaatgaagaatgacagtagcatcttcgttgctatcttcagttctctgaaaaggactccatgcgtacttacacagctgtcaaacttcttgataggttgaagatgctcattttagtgcatgtgtctattagttatttgatacattcagtaaaaacttcagcataattataagatatggaggcgggtacttgttaatgttgtctatgctattctatagttactattatgctcatgatcttatccatgtaaaatctgaagactctcctatgatattttgtatgcatttgttgcctttaaggatattcattcattccttccacttgtgacgattttgtttctttctccagaacataccgtaggactctctttatactactattcataagaggagatgaatgagacagagaatacacttctttaagattaatatagttactggtaatagtagctaatattatcacagtcctgtccttctaagattagtgttcgttcttaagattccaggaacaggagaacctaattattttaaagggtcttagagtgagatttcacatactggatcagctttaagactcctcttttgttgtaattaatgtgactcatcttgatattgctgatttttgttaaatgttgtaggcgtaatgtttataattagcactcttatagatttgaggttagctgagaagaaccttgacatttcattactgttttctagtatttccctctatgtgattttcattcaggttttcatctatatgcacctccttagaaatatctttggttattttcattaatggctgcaggcagtttttactaaatgtgcctgtttagtggaccatgcataagtatattctctggttagcagcagttttaattcatttttcttataaatggatttttatactttactaaccttttgtattagagtagacattgtgaagctaaaggaaaaacaggatagaattaatagaccaaataagttttaagattttcttgtccaaccctttttttttcagaaaagcagatttaaatcacctcatttatatttttgaaagctttcttgctcttaaaaaaaaaaaactgagcaaagtcagctttgtaacatatcaataaactattatgattcacaatatcagattttattttataaaccaaacaactcccagtatacatgcctgtttcttcttctaaccttagctaagatcagaaatactggtcacaatcttgagaaaactatttatgggcttggaaaaaaaaatcattcagtgatttcacaggatggtgatctcaacaatgaataagcccttcatttttctacactgggcaaatttttttttttttttttttttttttggagacggagtctccctgtgtcgcccaggctggagtgcaatggcgtgatcttgactcacttcaacctccgcctcctgagttcaagtgattttcctccctcagcctgctgagtagctggaactacaagtgcccgccacctcacctggctaatttttgtatttttggtagagacagggtttcaccatgttggccaggctggtctcaaactcctgaccccaggtgatccacccacctcagcctcccaaagtgctggcattacaggcgtgagccacttcaaacctgggcacattttctaatgcttctgaagttttccacatttttaccttagccttaaatttgaagatgatgtcagctctttgggcatataatcctaggaactagcactggttcaggactcactctgaagagttacagagtagaatttatctgttgcagttgtttggataatgccaaacaacaaataatccagatggggacctagctgcctgtcaggatctcagcccccaaacgaaatctggaggagacattggtgaattttcctcgatccttatctgtacctgtcccttttcatttccttactttggaccagcagacgttattgataatgtggaaggaacacaccctcatctttatgaaccaaatggaggcaataaagactttccactgagaaatatcattgaagatgaacgaggtagtgaaggttaggagaagcttggggtaaacagagacaaggggtttccaggctcagcctgaaaactcagagaataaaggaaaggtatccaggaacacaggaaacaaccatctgagtatgtttgagggtaaattccactaagactcaacagagatacatagaggagtcttttaacaactgctggactgtcgcatcaagaagattcccgtgtttccacagagggagcatcaaagtgtttctcccaaagttatacagataaagtgggatctgatctggcccattccctagggatttcccgggttgccagtggctttagccatttgccctctttgtcacatactaagagagccaccttcctaagttcctatcccatcagttacattgctccattacagttctcattaggaaccactgcatatttcaacatgaaaaattattttcatcactcctattttttcctggaccttgaaaggtattttttttttttactttcattccttccttagttgagaagacactcctatatttgttacaccttagttgttttcattttttcttataccactctttaaggtcttattttctttaggcttttcctctgacatttgatctaacaatagcatgtaaaaaatattcctataatactgcactcagaatgcagtagtatttattagtcctaaacatctagtctctctgtgtatcccctatcaaccatctaggtatgtatgatgaaaatctataacctacgtgactgtcatctagcatggatgaactatgtgaaagatacagctagttgaagtcattccatttcttttgttaaagcctttctgtgtctcataaaatgctagcagatgtgaaactctaaattagatgttaaattatctttttgtttattttttcttaaaatgtagactagggtagttctttgccatgtttaactactcatttgggccatatcatattagcaacacatccatttgagcaatgttgttttccttgtacacgggaaacaaagaagagggatcctttggctctgctcattacaccccccgccaccaccaccaccaaacactatcttgctaaggaagtatgtgcaacaaatcattttacttttacttttctatcattctctataggaattttcaactgctccaattcagtgtaaaagtcttcctttgggcagaattttcacattgtggactagaacagttggaaatcccaaatacttggtttaataccataatttattgaagcagtatcagagatttattattcaacttgatcatcaggatggcatgtttatacatatttaatttcttgtttctcttctgagttgagaaacttattaatcataagtctcggaactgtctttgcttattcatggtggtcaggacatatattcttagattcactgtactaaattcagtattcttactgatttttatttcaacaggctcagtcctgaggtaaggttgcatatgaaattttactgtcaactcagtttcataaaagataacatattttatcatcatcatcattgtcaccatcactatcactatcacactacatactcttgatttgatagtcagtactttaacttcccaatccgttattttgaccattttatcacatatatgtttaatatgcttacagaagggtggttgtaattctgatatgtaaatctacttataagcacttaagagtctctttcgtctttggtttccaaaatcggagcactggaattcagaatatggaaaattgctgcaaactaattggcatttcttatattactgcatcttcatatccaaaggactttattactacattatccatcagaggttatgattacattctggatctctgtgaattatttgattacatggaactggtttgagacaatttttctgtgcattttatggtgagtgattcttttaagggactcaaagatttttatctttgctccgttgactttggaatctttcatctgaagattgaaattcaagagttgagttcaaggagaaatactgctttctggggtttcctggtaaggacgatcatttcaatagcatgtactccccttttatatctactttctggttaatttttgaatgactggtgactaatatctatattgatataatgtgctcagtgataagagtgagacgttggttgttgttgttgttgttgttattattattattattattattattattgagacggagtttcgctcttgttgcccaggctggcatgcaatggcacgatctcggctcactgtaacctccgcctcccaggttcaagcgattctcctgcctcagcctcccaagtagctgggattacaggcatgtgccgccgtgcccggataattttgtatttttaatagagatggggtttctccatgttggtcaggctgatatcaaactcctgacctcaggtaatctgcccgcctcggcctcccaaagttctgggattacaaatgtgagccatcatgcccagccacactggttattttataacataaatttaggatagaaattctaaattaactgattttgcataactcactttatttgatgattactttgtatttctttttcgcctcttgtgatgatttaaattcccatcaggaatgtctactgtttttctcctttttgatagcaacaatgcaaaaatgcattctgtgtttataaagcacatatgtttaatttgtagtcccaccacgtaatctgatgatcgatatccagaaagacactgcggtggaaggtgaggagattgaagtcaactgcactgctatggccagcaagccagccacgactatcaggtggttcaaagggaacacagagctaaaaggtaagctgcagattgccacacactgaagtagttagctgattctagcagatatgcctttgtgaaaatcatggagaaatacaaaacatgcccatgaaacaaaagtattcatttagatatggtttataatcagttactaaatatgtctgaggccaaagcataaaagcattttattcttctaatccatgtcctcattctgctgtttgagggttcatggtgatagctgtcgctctactcagatgcccagaaagaactaaaactgtaaactagaactctttaggctaggaaaaattttcatgagggctgtctcctgagctcaggctgtctctgtctgtaccttcaattctaattgcttttaccctgtcttttgcagagacctagaggggaccagaagcccacattttcagggtatacatttaaaaaaatgtttaacagtctttcatatggtaaattccaagtcattctgacgtctattgcactatcacctgtgttgactatatgctttcctacaagagtggttgcactaagtggactaacagtttcatctaaattgtgaatttacagggaccacctttcttgtgaaatttgtgattcagttgcccaattcaccagtctgttcttatgcaggctgtgattttgtgatgacagtacaaggcagctccttcagccccattctgatcatctttacctctgtactgggccatcccgggttcgggtcctggatcctcaaatacctggcacctcaggtgttgcatcagataaaggagacagcctataccctatttgaccattttttgccagttatcttaaattccgcatgtatttctgcattgagattccttccttttcaaagttaccctgcaggtagtaccctgcacaaaggtcttaggggctgaactcctctaattgtttgacagaaatgctagtggcatgcttcagtttcctctaaaatagggttaatcgtattacatactttatggaatttttatgaagatgaaaagagggaatagttgtaaagtatttagctaatacttgggccaaagtaagtgctgtatatgtgcttgttaaataaataaagagcgtgagaaatgaaagaatcagcccttttagaaagaggatatagaaatctatatctggaagcagataaatctatatataacagcttaagtttcaagaagcttgttctgttttaatctcctacttcctaggtatggttttggaaggaaggagtttctcatttcctctctgcttttctgtctaagtgaattcagccattaaatgtgtaccgataagtacaaaacattaaaagaaagttaatggtgtgccatgttcctgggagtgctgagttcaggaagggactgccttggcctattcattccatccggaagcctcctccctccttttctgggtgttcttggatgtgtctcccatctggccccaagccctgtatcttactttgctctagcccactgccactgcatttttgaggtcttccaaaagtctcagagtttaaacatttcaattacaatttcaattatgtaaatccatttagttactttctctcttaattgttgatgatgggagtaggcaaagggggttgtttgtaactctactgcttgttgaattacttaggggatttggataatatcctagaatttctaaatggcatgacagcctagtcaatatttcaagttcagatggttgtaggggtgaaaaacatttttctttttctcctcctgaataccttgagcagccagatgtcagaatgtttcaactttcagctgtctttttctgggaggttttaagatagaaaaaccatacataatatatttcagtaaaaatagtgtatggtatttggacttgaaatatatcttaaatactatgctgcccggttgaaaagtcataaattaaggaaataaaaactttatcaggtaactatccacaggttactctcatcccaagtaactgccatcatatttgttaaaatagcaatgttggggttagaggacagaggggaggacataaaaacaaactgatggaaattcacccaactctggtgtcttggtacattttctgttccccaggcaaatcggaggtggaagagtggtcagacatgtacactgtgaccagtcagctgatgctgaaggtgcacaaggaggacgatggggtcccagtgatctgccaggtggagcaccctgcggtcactggaaacctgcagacccagcggtatctagaagtacagtgtgagtaccctggtatcttattctgagggcgtagagttgcagttacatagaaactcttcagaagccatttattcaatgcattcattttatatagtatacatagaattcttatttttgccagaaaaataaaggattattttattgaaatattgtactgccatattacagagtgccaatgaggatttgaaaatgctacattgaacccaaaggtaaaactgaaataatatcaatctgctctaacacgtgacttaattaatttctttgcatatagactgtcatcatttctatgccaactgcaaaatctagggtaattttccccctttttttatcccatcataagtactgaagtttttatagaagggatttttttcccatttacgtcggcattttgttttaaatgacattcctcctctattttagcttaaattagagcaatgagttgaaaagtcgactctttgggatcattgccacaatcttgatggcttcatcaataaaagctagattgtagtgagtgaggttttctccttaccatgccctgtagactgaatatgttttcctcatcttctcctctggacccttctgcttaaaaggaaaaagtctttttctgcacaaagccattcttatgccaaggttgtggctaagtagccagcttctcactttgtatttggcttctgaaaaatcaaggtgatctttgagtatgcatactgaaatgttaccagagtttggttgggatggtagtgattggatgtctgataaaggaaaagctttaccctttgtgaatcattggattaatttcctagggctgccataacaaattgtcacaaacttggtagcttaaaatagcagaaacttctttccttacaacgctttaggccagaagtccaaaatcaaggttttggcaggaccacaccccctcccaccacaaagactgtagggatggatcgttcattgatttttccagctctaggagtcccaggagcgccttaacttgtggcttcaccactccactctctgccttcatcgtcacatgaccttcccctctcctctgtgggtctctcgtctgtatgtttttctgaggacacttgtcattggatgtagggctcacccagataatccagaatggcctcatcttgagatccttaagctgatttcatctgtaaagactttttttccaaattcagctacagtcacagattccaagggttagaacatggacttatctttgggagccaccattcaactccatacaagccctattatttgtctaaatgatctgagcaaaatgggaaggcaggaaaagttataaaaagttgcttctaagaaaccatcccattccaaccttttcttaactccgtgagcttggctcaatttaacattacataatgcagggtttcctcgttaattcatttaatctgcttcaatatgggcatcatgcttataattttcatatcactaaaactattgtggtataatgtccctataatgggaaaacggaaatgatcagatattatctaaattagcagatagtagatttcttgtgactttgttaatatgtaattcatttaagcaaacttaatatccattaactttccttgtaggggcccattagctttaataatacattagctcctttgtacgtcctgagtagatattcacccagtttccacccctaaactctttcagtattttcccagaatatcttttaaatagaatatagtcccacccacctaccaaattaccctcactcccaaatgcaaaatatttcaagcgctacacctcctactccttggaaaacttgataatgatccttataagccttggtttccataatctgtagattctaagacaaggaataaggctccacatctgaatccatttgacttcaatctaacaaagtactgcgagcctttaattgcaggaaagtgactctaatgccctccaaaaacaaggatgcaccaattgatactttaaactctaatatggcacctttttgtgggagactctgttttttatccaagaaaatcatacaaatattttagcctttattccacttttcagaatatacataaggaaaaatatttttgtataaaggaaagctaagataattacaatgcattatattaacctgaatggaacttcgcatctggtttgatatcttaagtaaggctctctgtgctcaagaaagttcactaccctccactcctagagcactattgagaactttgcagagtcagccaggaattccttttgtagcttcttcaaacacagttggaattctctacatcatttcctaccagctttactctccttgaacactagcagctatgcagtaacaaaaagtttcattcctcaaatgcctgaagcactcagtcactgggccctgaagtctgatcagtcattgcccagtgctgttgatggctcaactccagtgccccccacagccgtcctctctctgcagacaagtagcaccatattttgatgaccatgaggaaagaagagacactcgaatacatgagattcctagaataatttattcagtagccactctgcatggaggttgaattattttggatgcctgtgaggagtaacattgcacctgtattttaatgttgactcatgccgttgaagtcagcagttcttaaccttttggggatcattggcccctttaaaaaccctttgatagctatagacctggaaaagatgaatacaatcacatattcaccatattctacttacaatctaaggagtccatttacccctcagggttttcctaaattcagttatttgaggaccactttcacaaatttgccatgttcatgcatcatctgtatttttacctgatttagaatttttctttaagtcactttattgctttaacctaaccagggcctatgtaaaaatatctattaaattacacatttcatttgttatatatagtgtctaataagctttaaaataaatgtacaactaatatttttcaatgtcctttcctttgtcacctaaaaagatttcttatgttctcggtgagaaacaataggttatcactaggaaatactgatcccattcatggacctcagagtctactccgagtaaataaggctaccttgggggcaaatctaatctgatactattggtattaaatatgctcacttgtttaagcctggctgattttacaccatgaaggtttatggaaacctctctttatccccatctaagatgaatggatgttaaccaggacatgaatagggttaaatgacagatcatggatttgaattctacatcaagtaatttttaaaaaatactattaaaaaggaaatgaaataatgaaaacctgcgttatatgtcattaaatatcttactttaagtaagacagggaaaaaagagaggaaggataaaaagaagggaagtgttgcacctctgtccttaaaatggagtgctaccatatggcatagaagacaaggcttgagctgcaacttggaattgcttttgtcttgtggatttaagtcctaattaattgaaccaggattttgcagtgtttgtttgttaggacccttatttgtgataccaggagaaattgttgtgcccaattatgtgaaaaatcagccagatgtgtatgctgtcatacttttaataatccttaagtttttggtgagtacagatattaattgtgtagtatgcattgaagtgattaacatcaatgtaatttatcatctggagatttctgaacataaataaatgagttgttttgttcagcaaggtgttgaccccttcagaatcagtgaattaaagtcccccccccttttttattataaatatgaaaggcaccacaatcagccaagtgttcagttatttgattttctggggcattagccgctcttgtttgtgacatttccctgttgggtgctcgtttgcaagctcattaataaggttttctcataggaacgttgccgggaatgaagaacatacagtaggtctcttagttttctagctttcattctgagactcagcaagggtacagcagcagcacacagttaaatgtttaaaacagaaaataattatgctcccaagctggaagagctcaaagctctctttccttagatgttatgcagagaacagttttgctttttaatgttccgagctgtatgaccctaaaatctttcagtgcatttttttcttgcgaatgtctgtacaggtggtggtgcccaaatttacaacatggttgattatagcagagtgtgatacaattgtagcacggttagtagagcttcagatctgagggaatgtactcttgtcaaataaaagcctgtttaaatgggaacagttcactgtctgagcgttaagagaaaactgtctaaatagcatcaaggtggcaacacatagcgacataagctgggaattcaaagaaaagctgtgaccctcagtatggaattcagattgctttgcacaagggaggaaagccttcctctggactggggtgaatatgaagctcttgaattactgctgtgtggcttctgctttcacccatcatagccttgctctttaaaatgtttggcaaaaatcctcattttttgagggttttgtgtttgtgcatattttaaaaaaagaaagaaaactcagagatgagttttgaaaagaagaatgaaaacaaagactctagaaatgggtgcttgaatgccatgcctgctctgattatcatctgacagttaattgtatacgtgggcatcattttcaaaatgagttttattgactgaatgtagctaggtattttataaatccatagccctgttcatccaaggtccagagaagggtagatttttttttttctttcattccctcaactggaggaaaattgggcattgaggagatgatcaaaacctgttctttatctgtgccaaaataaatgtttctctggtatcgatagtgccctgcattgaaggagagaggaaaacctggaaatcagaaaatctttcctatttggagtggaggataacacttagttcccaagagcagcttctatgtcaaatcctctccctcatcaattctgtttccaggttgtattcttcagagcataatagctggcgttttcagatttggcctgtttctctctgatctccagtctctctctctctctctctctctctctcttttttttttttttttaaacggaatacgctcttcctcccactctcccttttattttttttttaaagcagtgaattgagtttcagggaggttattttagtatttatgattccttatgagaaataatcaaggaatgaagaaccccgattgaagctaattttttaacctattatttctttgtgttaacacagagtagtgttggttccaagttcctgatattataaggactatagattgttagtgatacaatctgcagtaccaaaagtgtcaagaggctgagtaaccagtattcaaaatacaaagagtgagtgttgggcaaatacatcgtgagcaagactggaataacccttaagggaaaagcctttgcctttatacctgccttctgaatgcataccctgcagaaagaggcctgttttactaagaaccacctcctctcatctcactgaccttaatgtatttgtaaaagatgtgtctgtgtggctgtggacattgaatacttacatagtgaaaccagtcttctaatgcacatacttcacttaatggtttttaactcaaggttaaattttgattgtgtggaaggttaaatagttgtgaagctggcatctaaaaatctaaaaggaatggtcaaacaacatcctttctgatttcctgtaagacaccacttagagacacatcggaagtgctaaataaatgtatggtgaagtggaaatatgtaaagcagaacacctgggctgaacctctgatttgggcggctggattgaccttccaaaagaaaaacaaaattatattctgtgatgaggactaacgggaactcgtgatctgattttatttattttttaatcagtagtaaaggtggaaggagaagtccatgccccaatgtttcttcactttctcattcacttattccttcattcattcatccagcaactatgtcttgaatgcttactgtgtgccagtccctggcaccgttctagttaccaagacttcaagaaacagaacaaaacaaaacaaaaaaacccctctcttgttacagagggaagattcttgtacagaaaatcttgctatagggattttcttgcccagtgtttgcttacaaatgatgagaattgcttccaagacatggaagaatattctgtgagtatgtacccccatttaaaaagcagtgggaacaaagctttctgccaccacaccatgggatcaaatttgattcttttttgtaaacagtaattctaatacccacaaacctacctgaaagttgcagcaagagaagactgcattctactgtggtattggtcttacgtcagtcccaccagatttgactcatcccactcacaatcgttcagccctcttcaggaagcccagtttcagtactatgagtcataacaacagatgtaacagcaggaggttcttcaccttgcaaacaaacaaaataaacggcagtgaaaattattcatgaatgtattatgacaatagaaagcaaatattttgcaagatgttctctttaactcctctgagagctctgtgtgactccgttcattcaccaatcccagtcacctggcattgctagacattgccctcctttagttgcaaagctgtcctcccccaacaatttagacagccatattgtaggggttgattcttgctttgagctcaaacagcttctaacactcaccaaatctcaggttaatctttgcattgtcgttctactccaaactccaataatcctccatgattgacaaagactcttcagtcaatgcttcctcacttgaatgcacaggggctgacccagacccgctacccagacattctgatatcatctgtgctcatgctgcccttgagttctccctggtaggacttgaaacaattagcacttgatccacaagcatcaaatccccatactccttggtgtttcagaatattgggtgaaatctaagtaagaaacatgaagaagagcctgtgtcccaaatgcagttgcagaaacagatttgcactcaagcccctggacctagttgcattgagcacatcaaagaaaatatgacacctgcatttcctgatttagaaattcttaggaagagagggaaggttgtggggactccagggataataggtctcccgctggcatgtctcctgccagggtatgaggatgccttttccactgactcagctctgctcctctctgctaccctggaagggtgacatcccagtcatgaagaaactgcaaagtacctttttctaaataaaggaatgcaaagacctgatacgttagtgtttggacctacagaggagactgtgtcttttcatttacataggaaactgaaatacaggttcagaatcttgagtttcatcttctgaaaagatcacagaatgtggtgcaaggtcagactggcatgaaatcaattgtaatctgccagcaacccattccaacctctttaagagtttccttttatatattttttccctttatagagagagcaaagtacatttaaagaaagtctcatcaaatcagaatgtctttctaatattatttttttaattggttgctactgtagtgtgacctaaagcctcctggtgtttaaccctctgtgcaactttgactaatgaacaaatttgtctgctatagcagtcttgctaaatgtcttttacagggtttaaaaaaattcacagtgtattatgaaaacctcagatccctcgacctaattgattggctgttgatgatgccatgtctataactgtaatgttctttaagtgtacagacctaactatttttcttatttttatatagcagttccattttataatgacattaagccattctgagtgatacatttctgggcagttattgcacttgggtagaaagtatcgtctggcttttggcctcatgccttacaacaccaaccgaggcgtaaaatgatcccccagaaaatgtactaggctttacctcattacttaaaaataaatcttggaggctggttctgtttcagaaaaggtttggtgggttataacatttgatttatgaacataattaaaatataaatgatgagctctgggctattcaatcagccatctggattgtttggtattttgacatattcatatcgtagttaggctcttcaatggaaaatttaatgtcccttagttctagaggtgccagtggaatcccagggtttctattccacctgttgaaaatgcttaagtttctctttcaggacaaaggaaggggaacagaatttatttttaagtttccatcacccagggatagatctcggcacatagaccttctataatatttgattcctaggctgggcgagaggatagctcatctgcccgtggtcagataatatgcctataaatactgcatgtgtcaacagaggggaacatttttctgtataatgcaggcaagactaacgcttaccttttcagccagctattacggtaactgtggcagctgtagccataagtagatagtagatgtttctccagaacttaaagagtaaattgggaaaatcagttatcaaaactgaaggtgtattttttgtgatttagtaaatggtttttaaaataaattttgggtataacaaatccttagcttgttcttcccaatttatgtgaataattggcaactgataaacagctcattaggaacataaaaaagcatttaactaaaactcagtggtactgaagaagcagggtggattaagtttttcaacactgtctttattattgatggaagttgagcatgtaaaatccttagtgcactatgctgaaaaatatgccctctctgtttgcttgtaaattacattaaggaaaaaagaagaaaaacaaaatccttccacataggccagcaagcattctgcttcttcttaattaatggccaaagtcagcagtgcatgaaaaacgtagcctttctgtagatcagagattaacctataagcagatgttacatttcagcccaaattttgggctttaaatttagcctcacccagaaggttcatgggtaagaatgatagaggtcccctaactaggaactctagtaagtgctgctgtttctgggtatgaactgtgaggtagcaggtcttctgttttctgtgtgtccagtgtcataaccttcttctttcattttttttgtatcttttttaaaaactaaacttcactaactagtgtgtgtgtgttacacgactacaaacaataaacccacacctgatgcccagcagttgtagttagcctaatatgtggcctctgtctctgaaagggggtgcccaggagctcttgaaccacccagtgctggttcaaggtcatcctgtttatcctttacaagcatttctgcttttctttaatgactaccttcccgacccagttatcagtatctggaaacctcaacaccattttgctcttaaacagtttctttgccaacgtgtccaagaatagaactgtgtaacttgcaagggtcagctggagcttctgggcttgttaactttacgttctctggcaagagacttagcttctcagaaagcactaccaattctcagtatgcagtgcacactggtgggtgaacaagggggctctcttaaaaggttttgaatgccatgtaatttttagagacatgagagaaagatttgtgataggaaagagactataagaatgcatctagaaagcagctatctctagtgaggacttccttgtgcagcttatatagctgtgtacaagatgagattggttgagccttgccgtaatatttctatcttctcccttattccataggatgaatgttaatgagctaaccacagcttgtaaaaggccaaggggctgttgtttaggtggtatgattgtctgagaaagtaaaactatggtaattattttgacctttcagccaaccgatgtcttgccctctcacatttattactcttgggtacatttccaaaaatatgcatttacagagccacagaattaaatgagaaaaccgatttagggattaatagcttgttagttcagcactgaaaaaaacgatctcctaattacattcagattttatttgttaatgtatttgtatgtgtatctatgttaattccaacttctgtagcttccctccctattccctgaacctcccattattcagctctcatagccatatccccacactgacaaatacagttttaagtagctggtggaaatgagaatacttatatctccttcctaagtacctcactgcattaggaagctatacctggctttaattatggattgccattggaaatgcacttatggatcagaaatctatcccaacatacacttatggggctgtctctctctctgtgatcttggatgagctacttcaatctgtgggtaccagagttcccatccctaaaactaggcttattctacccccaatgatggttcctaggggagtagatgctgagtaaatgtcagtattttttctttttaatgtttacactgagatgtcagagttttcactgggagggcttccaaaatatcccagttgttttttcttaaagtcattcagtctgcctttctcatttgaaaacaagaacatagaagaggcaaatttattaacatgcagtgtcacaacatattgtcacatagtaatatatgatatatgataaaatgtatcaattctgagcaccacagatatctatggcttcacctcagcatgaaggcaaatgagtttcctttagcttgagtgagtttggagataaacttcagtgtaacaaaatgtatttcacaggaaatgtttgatgtggcgcagttggcttatgaatctcttatctatttgcggttcactccttagagttattagtcaatttaatttgagcaaatgccaggattaccaactaattagaagggtgttactgaaggcatcggatgggagagagtaagtgctggtactgtggttttgaggcagtgtgtgagtctgattttgcctgatgatatcatttgctaaacattatactttgtgtttttgtcacacagataagcctcaagtgcacattcagatgacttatcctctacaaggcttaacccgggaaggggacgcgcttgagttaacatgtgaagccatcgggaagccccagtaagttctgaaggccaaagttggcagagggtcatgcgcagtaaatgtcacaacacagacatgtgcattcaccagtccttggcctgtcacctgtctcctgctgcaaaggatggatggtttttcaggaactaaagaatattcagtgagagtggaaataaatatccatagttcttaatggtcaggactgggaggaaaattaaatgcccgctaagattgaaatctcagctaattctattttattattatcaacatgattgtcaggactattttctctcacacacaaaaaaataatcctaataaattattggtgtccctacaatctaatgatatatctgccaccttttgtgttaatgtctaagctgctagaaagatggttttaagacttacattaagctgctatgtttagggccagctgtaggcaaatgaatttgccctacctttaattttgcatcttcttccctcaaagaaaagtgtcattcatacttgactcccagaaatatttttgttagtaaggaaaagctcaggaacttttcttaaggaggatatatatgccacttcataagagaaaaagaagaaacaactaagactcttattttattgaaagtataaaggagccacttgagttgccctgtgaaatgatccaaagtgaatttgaggaactacatatatcatcactaatacaagaaaaaaagccacacagtggtaccattttaactattattcagtttacttactgggcaggggacacttctttagtgtttctagtaaagattgtttttaactgttccttagtgggggaaagaaaaaaacaagttgaggattcatgaaatggaataataggtcaatgttgggattaaggacactcaaactttagtggtacccaacaaaaaacagcattgagctccctttgctgtccccgtagtatgattttgttttttccctcaaagagttttgctagccagcgtcatcacagttttcatataaagaattcagagcatcttaacaaagcttccccagaaatctctggaaagaagcctccctactttaactaaggaatgatctatgacaagagaccagaaagccaaagggggctctgcctgctgttggttctctcttctcatttcaaccctccctatctttgcacttacctctccatgtgctggaatttccttccctctgtgctaaccatgtggagttttaaatgacctttaggagctggaaagtggtcttggttctgtttcactttccctctggtgtttccaagttatttggttttgaatgcttcgagcttcagcagagtgatctttttctcttttgagcactgccaaagattcagatctttctttttgtaaacagtttgaattattccctaattagcagctttcttccagaataatccaatggagtaagaaaaaaaaattctcagaggcctcttgccgcttgcaatacccgtgctcggccacattaaccacagttacagtctatggcttgctaacctatactttgtttttgtatttttcccctgaagaaggtacttcgttcaattgaatgtgccacggggacagtaaattacatgtttccttcaggacatttatgccagagaagggatttgtttgttcctttcaaataggaaccagtatatggttgtgtgagcaagctcacattactctactgctaccccttctagcatgttacttatttattttctcaagaaattgcatacaataaaaatggtaatttaacttgccattaaatgttgtgaagattctcagcagttacccctactgattgtttcagctgtcaagcagcaggacattacgtctgattgccaggcaggcccatttgccattgcctacaaggaggacatatgcagtactaatttttaaataatttactgggttgtgatgacaaacccatgtgtaattaaagaaaaattgtaacttcacatcccatttgaaaattggaatgctacttgacagggctaacttgaggatccgttcatcattaagcatgggtctcttgtcgtgtcgctgctcctagaggcagctgtaggaactggaaggaagtcacttgtgtgctggatctctgttgtccttccttcaaaatgaaagttttcaggcacaattctaaatgtggcctcaacttcataggaggttgagggaagtgccttgaagaatggaagttttcaaaagatacttggtgtgtatgcatttttagctttggcgaatcttatgaaatttgctttttcctgatggatacaaatgtggcactttaaatcactaaaacaaacttgtctctgatgagcaaatgccctgggccctaagggatccatgtggaatgcatgccatggtgattagcctgagagccctacccacgagcttggggagctgcaggtgcacacacagggaaagttctcacaatatgcaggccttggagagccagtaaagaaggcaatttgccaaggaacagatagacatggtggactagggcatcagagacaggggtggcattctgggtagggggatgcaggttatggggaggggttaaagggaagaggaaatgattacatctttccagaatcaaaggtggtttttcaaacagaggcccaagaaaagcactattcagatataaaagtccattccttttggtgaaactcaaaatccatctaaatatcacaagaggcttctaaacaagtcttggtgtgttagtaaccatcagatgaatgcatgtatcactagccaagaacttgatttctttcctaattaatgagatgttaacaatgggtgaggtctgtcctgcctgagttggtgtgaaaccacacagcggggcataaaaataggcacactgttttatttgttgatttgtcgaacatgaattggaaataatgagactcctgcttgtggtctgttcaaagtttttcaacacctgatcgtgtttaaaagaaaaaaattgtataccaaacagatttttggagacttcacagttgtaattctgtgaacttaaaatatctccagtaggtcctcattaattgtgtcaccctgcatgtgggtgagcagtttgatgcaatggggaatgataatgtgacttgtcttcctccccttccccctgcaggcctgtgatggtaacttgggtgagagtcgatgatgaaatgcctcaacacgccgtactgtctgggcccaacctgttcatcaataacctaaacaaaacagataatggtacataccgctgtgaagcttcaaacatagtggggaaagctcactcggattatatgctgtatgtatacggtacgtgagaagataaaatgctcttctactagagtcagtcacatggagctgctacttgtgatttactctcaaagcttttggtcaagttgaaaatcaaaaaccagttggtttccttctagaacttaaagaagcctggcctgaggtggaccctagtgtctccacctgggatagtgacttttcttctctccctctaatggtgggtgtttctactagatcacagtctttggtcatgctgagaaggaaagctgtgtcctcaggcacaagccatggagattacgttagaagtaatgactgaaacattcagccttaccaattagcagcttttcagctcagaaagtttattcccagtggtattttactatgatacctgggctagctttctcctgctttgatgagcagaactattctattttcagcatgaagctattaattccaaaagatgttgtaagccagtaaatactcagaacaaatacaaggtcccttgtagctacatgaaccacctgtagctactgcttcagaacaaaagcttttttaaaaaatgtgtcttttttttaatatcattttacaggattattaaaacatcatgaattttattctctagtcaacagatatttattgagcatctactacatttcaggcatcttaaacttacttcctgtttataacttactgttgattttgcaaatggtgaatattttctatttagttgagatgtgcacctcctctctagttttataatatcaaattaagtctcttctgttcaattgaagcctcatatgccaaaaaatagccatgaactgacatgacaaagaatgagtaaccagaggcatcggcatttcaatgtgttataaatatttgaatgtgtgtgtgtgaagggggtatttttttcttgatgttaccagtgtaaataatccaaatataagtatatatgaataaatgtttagatacacataaattatacctttgaaatatccacaccacagtgtcttagaaccagggtactttgcttatgaagaaaataggagtggcagtctttttaatcaaatagaagcatgctttacaccatatctgcatggatattaaaatataatccttagcctatacctgaggtttttttcctagcataatgcaaaattaaaagatcacatctaatcaccttatttgtagacttctgaagtatgttttatctttacgcactaccaatgttgtccgtggttgtattatgtctgttcacacataataacattaattctcccagtagttaaggaaatccatgtgaagcaaacagcttttctacataggtgagaggggacacagcatggcccgttttcagctggcgatatgcagagccacctctttccacagactgctcggcgggggtgaaaagtacattcctccctttttctgcatgtgctctcttcacacaagggcctgcgcctcatgggagtccccgacattgctgttgcccgggtttactggctttcagtccagctctttacaaactgcaggttataaaaagcagtgacaaatttccattagtctgttatgtgcatccttgattcagaacactaagttatctggataaacagttttgatttattgtacttactgcccctacatttcaagagaagaaacattttgtgggtttgatggacagatatatttgaataattttggatagtagtttatagctagcatttatttagtgctcactttattccatgccctatggtaacgattttccaagcatggtctcctttaatctccacaataacaccaggaggcaggcattatcacgatcccattttacagatgataaactgaagttcagaaaggttgtacagttttccccaacttcaccaggtttctaaatgtgttttagaaccaaaatactttggctctaaagtccacaacaaagtatgtctttctttgtatattctcttattctcactgctttccagtagaacaatccccttcaatatgagatgatccttttagaattaactgtctgggccagagtgcattatctgaaaaccaagaaatatagggatccacctgttaaaggcagacacagctacatacacatgtctccctaatccaagatggtacacctatccttgtctagggatttgctagatctgtaatatactacctatctcccctaatcagtcctagtaacaatacttgggatgacagattagaatattagcctaaggtattactagtctactaacaaaatactctagcagtttgggaaggtgttgagtagattttctttccaaagctgatttgttgtattactaccataattttggaagtattttatgaactaaaagttagcaagcccccataaagtttaactctctagaagcaacttctacacatgaagaatctagctggttagtgcctgagccccaactgattttattcttttagcctctacatgtcaagcacagctcattaactccaactctgtactttcttaagtggtggcctcacattgctcttattgctagaaatgatctaagcactgaagttattttacctgttaaaggaatctaattctttcaggtcactttagccagatgtgaaggacaacagttgccccagtcgtgataaagataattgaaagtgtgtgatttgcacaaaatgggagggactgatgacctttctctgaagtctgtgtcttcattagtctggtccaccccttggttcataatcatattttcaaatcaccttcagatctactcttattgtattgtggacatcacacactttatgtcaacacttttagaataggtgcagaaataggattataggctgggcgtggtggctcacgcctgtaatctcagcactttgggaggccgaggtgggtggatcacaaggtcaggagtttgagaccagcctggccaatatggtgaaaccccgtctctactaaaaaaaaaaaaaaaatacaaaaattagctgggtgtggtggcgcatgcctgtagtcccagctactcgggaggctgaggcagaagaattgcttgaacccgggaagcggagattgcagtgagctgagatcatgccactgcactccagcctgggcgacaaagcaagactccgtctaaaaaaaaaaaaaaaaaaaaaaaagaaataggattatagtatatcaggggaaatctcccaggaacaaatgttccttttcagtagtagatatagtaattgaagcaaaacagaaaaatcacattaactgaccctgtgctgggcagcaggcacctctctggatatagtttagttgtgtagtggagggagcgggacgtctttagtgctgggctcaggggtcagtgcacttggttcatttatatctatgctgacacctgcagcaggtgtgtaggtgcatccaaatgagtttccaggtcacaaaatgcttccctgtggcctccataaaaagtgtgaaggagcaagactgaacacatggcctgaatcaccgtatttctcattctgcctttcttttaaaaaggtagtttaaaaacactaacttaaccatttttacctcttggaggagaatgagatttttttttaaacgacatccttttttggactcacgtgaggctgctttaaatgaaagtgtaaactgcttgtatccccatcttaaaggaacggagcctcccattgaacagaacagttgattcttctctgttaatttcatccaagtgtgtttgtgtgagagaagcaatttgtgaggaaaattaaaagctcagattgttgatcgatggtagatatcattttaagtagactttgcaaccaagcaccaaaataatatttctataaacttttgggaagttgcaccaaacccaataaaggtgcagtatataattaaagttttgatgtattaattagacaatctgagagctcacttgaagataaaaggacaccagatgtgtcagggagaaaaagttgacatgctttagataaaatttaaaatcaaaagctttcaaatcgtcttatgctctattatagcagaatgattgcttagttcaaagtcttgctgacaatttaacacattcagtttgatcatttgggcttagaatttttttttctctttcatatttgcccctcccttgtctccaaataatttttgagatgatagaagaatatacagtatatcaaatatctgacagagggttccctatcaggttcctggctttgaaggtcgagtctcatttatatttagttctcttgtttacaagatggaaaacgttctttcagttttatcactgtagtctacttaggtcaagcttttaatatgagcaaaggcaacttattaatatttataagttgtaaaatttattgacttttaaagaataaaatctcagtaaaatctcacatgcctggaacttgatatttagtggtgacattctctcttctttgtatttattatgagtagagaagtagttttacttcctgctgggttgtattgatggagaataatgaagttaacagtcacagagagcaagtgtgcaggggcacgctcatccttggctgatatgagccccctaatagagcagcaccacctcctcctcctccttcctgccatctgtaaaagctgaaacgaaatgacaaccattgtaccctcttggtactgagttgatttaacctcacctttgaaatctggtagggaagaggggtgtcgtatgttttgatttttcctcccctctcttcacatctcctcatccctaattcacttcattaatgaaaattctcttttcttcttttctcagctcttccaactaaggctttgggatataattacaagacataaatcttgcagggaaagaacttttggttttaaagggggaagccatcaaacaaacatctcaatgtcctcatgcctttgttttgtcattactggtcattgttgtgttcagnnnnnnnnnnnnnnnnnnnnnnnnnnnnnnnnnnnnnnnnnnnnnnnnnnnnnnnnnnnnnnnnnnnnnnnnnnnnnnnnnaccaccaccaccaccatccttaccatcatcacaggtatggtatcttcattaccattgaaaatgtcctgaatgtatattgtctttctggtatgtataaaaagaagccgaaaagttccctttaaatccttggaatttaatcgttcctttattttggaactccaacgacattagatactatgttcttaagttgaatcttaaggacctcagaaacatcccagcatttaacagtacgtcagatattttgcagcttatgcataaaagaattcttttttaagcatcactattgaaagcaaaatgctagggaaaatggcagctggctactagagaacacgcctatagcttctgcttagacatgtttgatgaaatggtaagtactgtggctttcaatcttgtctctgtcttagtttcatctcagtccatgtaagggaaaatatacacacctaacttcaatgtgcctatttgggccatgctactaaatgcatagtcatccttcctgctccagagagtacccgctgacaagtgatactacctgtttgtgttgcctaggtagtcacaagagatcagagggagtcactgtcttttccatgctgagcactcatgtgcccctccctgccctcggtcacatattggaagagtggaagaggcagccactgtggttctaactctgcggctttatctttttggactgtctgaaactcttattcagcatgagttttactgtctcttgtttctgtcactgagggaggtggcatgccatccagcccttcctggcatccagtggctctctcatactgcttgatgtggcttgtctgggagccatggggtttcttctgcctacctaagtaggaaagcttctggccacactatgtccacttgacatgaaggatttccctagataaggccttcccaacctgtgtttacagggacttaacacaaaaacatgtgaaagtaattattctgtgagaaaaaaatatctcttgaaagagtaacttttccgctgcattttgttagctggtgagactgcaaggtatctgaaccgtgtgccctggtacccacccctgtctctggacttctttatgaacactgagtatttgactccccacccttcatggtcagctccttttaacaccctagatatcattgctgtccttttcattgacatgctagagacatttccaattttcatgggagtcagtaagatagagatgatgaaaattcagagtgttcaaagaaagaggaggcctcatcagttgatagaatatacaacagattgtctaatctcagttttcttcacttttctacccattacagtggaaaaaagaacccttaaggaagccagtgcttctcaacattggttacaaaaccatcagtgccagcacttaatttaaaatcttctgaaaatccatcagttggttttcatgtctcactctaaactcagctccaaccaggctgcttcctagattcttgtctgtgtgtgtttctgttttggctctttgttacttccttctgtaaacttaagtaaactcagtttgttgacctagtgaattgattctttccattttctatactattcaccagcatatcaaagatgcttcttcctaactctgatttccagagtaactgtgctatcagcttttcatactaagaactaggtttttaccttttcacatttcttgcctcctacccagttcgtaagccaaattagactcgtactcttgtgaagtgccctttagatactagtgtaaaatatactgcgtaattctccattgccctacatatattaaccctttaagaaaatatatcaccagtctattttatcttcgcagaacttgcccaggtatgagccagcatttattaccactcattctagaaggtgccagttaggtagctatccaggtttacattttaaggcagtcgagaccttattcacgtggtatataaacaaccacatttctcttttatatggaacaagacttttcatttgcggctggccttctcactagcttatgctttttttttttaagacctttcttagcactcgctgaactcctccccctcacaatcaatctcagcaactcagcagagtcgcttcagttcacagctcttaatccttcactccagactaaagctaatcttatgtcctcaaacagctacaactcactgttatcacagttccgactgcagagactccatttaagaggaaatttaaaaaataaacaatgctctatttctgtccacatcaaaggtacctctaacagaaacttgtctttgcttctgtctctctgctactggactctcagctcaaggtaatgtaagatgatctcatagatgcactttagcctcttgatgttagcagttgagtcctccctgcgcacaaaatacatttgtggtaatgaatgcccagaatctcactggcacacccaagagtagttaaactaaaattgctactaacacaacattgtagaattcgttgccttaatggatgtgatcttctaggcttactgtgtcttaacaagcagtcttatatatatttatcttgcccagaaagtacacttgtagaatttaacatttgctcctttctccaaacagattaaaggttatgcagctgaatgattctgtgtcccattttaaaggtccaggctatcccctagatttagattagttcctaaaaaatcttccagtctgaatcctgacaaatggatagctaaattaatttccactcctcttctctcttgcactgtttggtacattacagccaccattagccttaaaagctgcagcagccaaattcggtgacagtaacataaagcctgagcttaaaaaaaaaaaaaaaaaaaaaaaaaaaaaaaaaaaaaagaagtccacagtcatctatttcttttctgccagtcaaatgcaataactgaaacccattccctaggtcagggtttcattacaagaaaaatgtacacatgcaatagaaaaatagttttaaactcgagaagtcatagttgatttctgatttctctgaaaggaagtgttccagtgttatcttttatcttccgtaaccaggataatcaaattgttccccttgttaggaaggcagactgacattctgttctgagtcgcctgacttccttgaaacatgttaaagcttcatcgtggagacccttcagagagaaaaattataagccaaatcggactctgctttgcccacccagaatcatacccctcatgggtgggagcacagggcgttttctgcctcctgcttaccctacacggagcaggtctggagagttacacgtgaaggcacacatctaaatgtggccttatctagggagaaatttttgtagtctctaaagtactgaaaggaatacaaacagtccctgatttatgatggttcatcttacaattttttgactttaggatggtccaaaagcaatacgtattcaacagaaaccgtacccatacagcctttcactttcagtacagtattcaataaattccataagatcttcaacaccttataaaataggctttgtgttagatggttttacccaactataggctaatgtaagtgtcctgtgcatgtttaagggaggctatgctaagctgtgatgtttggtaggttaggtgtctcagatggatttccagcttacaatgttttcaacttagggtgcgttgattgggacatagccccatcgaaagtcaaggagcatctgtatttgatgtcaacttgccgtatcaacttgttgtggctttaaaaccattaagccattatagcaccattaaattttttttccaactataaaacagttttagattgggagccattcagagcctcactatgatttgccacgaggttccttggagtctgttttctttcctgtgtattgatagtctgaccatatatttctgtttcaactattgctattggcaagcccctgttccttttttttattgtgtcaaattgtccgtgtggtttcattcatgaagacatatgctgtcatgtggaagcataaattgcataatttaaattgtccctggaatcctttgtgaaaaagtggagacagccagccattaccccgggtaagagtccttcacacagattcctgtcaaaaactagaatagaagaaaaccctgatgccatgctggggtggcgggaggaggtgggggagtgtgagtgagtagggagtgtttgttctgtcttgtttttaactttctttgtaattagttgactttgtgtgttaggtgtacataaacttacccatttctgtgatagtattagcccctgtcttccagttggatcaaactttttcctgtaatcatctcaggaaagcatgttgtgtttcccttcctagttagcgtggctgttgttttgtttgtacctggttgcatcttgagttagatgcttgatgaggaatatcatagaaaggactccacactcagttttaaatacccttagcaacttacagagaaaattcaggctgggaggagttcaacctggaggtcacactagacatgtgactgtcataaattaaaaaattaaaaccaccttagaataagaaatgaatagctatagggccaaattgtgaaacacattaaaaaatcctttcataagaatgaagtaggtcatttctaaatgagttttccaccttttaaaagtacgtacccaattaaatattttgtgttcctaggaaaagaaaatagccaggcttttcttattggtatctaagtactcaaaaaccaatatagcttgtagcaaatgattcctacccccaggcccacattattatttttggctttcatagtctgaaatcataagcttttgttttgtgtaatgtggattggatcacataaagaaggtgggtatagcctttatccttcagtgatatgtatagaatatgcccaagtggggaaacttgacaccagaacacatgtttttagttccttaggtacaaagcaaagaagcacacctgtccttaagactgaatctatgtcatgaccatctaaatgatgatagagagctttcctccaaatacagctggctattccccagggtcttagcctaatgattcctactctttgctattgatatttgcatggttcaagagctggtctgcttttagttatgcactcaacaaatattgagtgcccataatatgtacagcacgatgctagtgcttatggagacaaaatactccctaaaccccttatcatgtggttgcgagaacaggttacacacattggaacccaataagagatactgtacaattggggtgattcggtggcacaggcagaaggtgccgcagatgctgaggagagtgtcacagtggactttggtctgtgccatcaaagaagggacaaaatgtggataagaaaggatggcattttggaagttacacatgaaggtccaatgttacttcaagcatctatcttcaatgtgtgtttattttgcatgtatttatgtttcaggcatagattaggccactcttgctaggagatacacatcttcatcctagaatgtttactaaattgcctttttttctagagttgacatctacttcattaagattatttttcattcagcatttatggaatattcatcaagtgttattgatatgccagtatacctagtgacaagaatattttgggggcactagtaaatactcatgagccaccttttannnnnnnnnnnnnnnnnnnncacacaacatgatataggaattgtttttcttgttaaatgaaaccactatacagattcctattattttgcagaacatctggtttgcaaatgaaaagatctcaggggcacaacagcactagtgaacaattctgaagaagcttttaacaaaacttgaaattgcttatccaaaaaaaaaaatcatcccccgttgctgctgttctgtagcacacaatctcttcactcacaggggaggtgactttaacaaggaagagagctttatcctgtctctcctactttggccttttagttttcattctgttcctatccacttctcccatccctaagacaggggagtttgattaaaacataacatagatggaaagaaaattagccaggaaaccaggagaaaataaattccagagtttaattttccagcagttatttttgttttcgatcgagttcaaataacatgaaagagaagaaaaaaaaaaaacccaccatatatttaatatatattggccagcacagcacaactatgaaaataaaattgtcaggggaattccttgcctgccctagtgtctagatttaaagcacctccataacacaaactgaaggggaattcaattaagaaaacccattggcttcttattgactttagttaagaaaataaactgggagaaagtgtattaaaatatgtctaactgcttagtatgctttcatttaggcttatgacaatcaaaaatgagagaatttaaattttttacaattaagctctggttttgagtagattgtgggttatcacaccgtgcatttttttaatgtacaccttactcaaacacaccctaaaatgcaggcttgcagtctgcgcattgtaaagcaggagcaccgcagatcaattgggggaaaaaatatttaaggttgtaaatttaattttgttctaggattttcattttcatttatggcacccgttgtgtttgagaacatggaccaatttatggattagttttaaacccccagtctgtcacactcaatgaacaattctaagttggagagaatccatatgaaaggattagaatgtgctccagtgggagcttacacatggactgtttcaactaaatattgcccagctgcctctcctgcagtattatttttnnnnnnnnnnnnnnnnnnnngtctgcttttagttatgcactcaacaaatattgagtgcccataatatgtacagcacgatgctagtgcttatggagacaaaatactccctaaaccccttatcatgtggttgcgagaacaggttacacacattggaacccaataagagatactgtacaattggggtgattcggtggcacaggcagaaggtgccgcagatgctgaggagagtgtcacagtggactttggtctgtgccatcaaagaagggacaaaatgtggataagaaaggatggcattttggaagttacacatgaaggtccaatgttacttcaagcatctatcttcaatgtgtgtttattttgcatgtatttatgtttcaggcatagattaggccactcttgctaggagatacacatcttcatcctagaatgtttactaaattgcctttttttctagagttgacatctacttcattaagattatttttcattcagcatttatggaatattcatcaagtgttattgatatgccagtatacctagtgacaagaatattttgggggcactagtaaatactcatgagccaccttttacataataagccaccttttcaagtttttactccaaaaagtatgtgtccatttttcttcatactgtcttaagtgtctacatttttttttcctgataattgtaaacctgttacaaataacaacatagctaaccagcttttgacctatattgatttaggagggaatgagaaaagacttgaatactacagtgatggaggccacctgaccccatattttttaaaaaatgaatgagaaatgtgatgctagtggaaaagtttttaatgcctctatcataatttcaataactttatgctctttattttaaaaataatcttggagataaagatatgacatgttttcatactaaagacctaatcaacaatgcaaacaaataatactgtgaatacaggtttcccagaattaaaaagtgatgtttacagctatcttggtagtgaaaaataaaagacttgactggaaggacccagccctcccatatctaacacaaaatttgccaagacttaaaaatgtgctacaacttacagagagcctctttcctgtctccatcactaccctcgtggcaacatcctcttcttttccttccctcccctctgccttcctcttttctgtacccccttccactgagcattcacacacaacatgatataggaattgtttttcttgttaaatgaaaccactatacagattcctattattttgcagaacatctggtttgcaaatgaaaagatctcaggggcacaacagcactagtgaacaattctgaagaagcttttaacaaaactttgaaattgcttatccaaaaaaaaaaatcatcccccgttgnnnnnnnnnnnnnnnnnnnnnnnnnnnnnnnnnnnnnnnnnnnnnnnnnnnnnnnnnnnnnnnnnnnnnnnnnnnnnnnnnnnnnnnnnnnnnnnnnnnnnnnnnnnnnnnnnnnnnnnnnnnnnnnnnnnnnnnnnnnnnnnnnnnnnnnnnnnnnnnnnnnnnnnnnnnnnnnnnnnnnnnnnnnnnnnnnnnnnnnnnnnnnnnnnnnnnnnnnnnnnnnnnnnnnnnnnnnnnnnnnnnnnnnnnnnnnnnnnnnnnnnnnnnnnnnnnnnnnnnnnnnnnnnnnnnnnnnnnnnnnnnnnnnnnnnnnnnnnnnnnnnnnnnnnnnnnnnnnnnnnnnnnnnnnnnnnnnnnnnnnnnnnnnnnnnnnnnnnnnnnnnnnnnnnnnnnnnnnnnnnnnnnnnnnnnnnnnnnnnnnnnnnnnnnnnnnnnnnnnnnntttgagtagattgtgggttatcacaccgtgcatttttttaatgtacaccttactcaaacacaccctaaaatgcaggcttgcagtctgcgcattgtaaagcaggagcaccgcagtatcaattgggggaaaaaatatttaaggttgtaaatttaattttgttctaggattttcattttcatttatggcacccgttgtgtttgagaacatggaccaatttatggattagttttaaacccccagtctgtcacactcaatgaacaattctaagttggagagaatccatatgaaaggattagaatgtgccacagtggagcttacacatgactgtttcaactaaatattgcccagctgcctctcctgcagtattatttttttttttttgctacttagttaaattgctagtgtctctaatttcacacattgtcagagctttttttattttgtaaatatactgccacaataaatgtatgtgatgtttcatttattcaagatggggtctgataaactgtaggactaggagactaagaagagaagtcaattttgagtagaatgtgcatctttcaaataatattgctgggcccttctttggataccttgtttgactgtactcataaaatagccagagagtgactgttaagaccgtacacacttaatgggttttcaagaagatgggattgttttttcttggccatataatataaatgtataataaatttgctctctttgtaattaaaattaagagacagtagctcagctaggccttttaaatgtctatataacccaacaccaccataagtccagctcaattttttgtgacctgtttttctcatgggctagctcaaagattttttttttttaaggcagcagcaagatgaggttttaaaaaggctttgttagggcaattagacattttcatttttcaagctgattatagcatttatcacttacattgaaatttagtatttgcattttgcctctacgcttagaatgttacccaacaatatggtcaccacacaagttgattcacagggtgtgtttgcacatttctccagttttctgattaagataccctaataaatcctgcctcacagagttgcactcacttcagagccagggtgtctgtggtttctgcatgaagtcataacgcaattatgaaggagaattagattctgtcatcgtggtctcctgcagggagcacaaagttacttctaaagaatgttttcttaattctttacttgaaaataacctctgttcaagtagcataccagatgctcttagagaaatggagtcagtgactccccagacacaccatcaatcttgctctgaactttgtagccagcctgtgtttctcctgcagtctcctaccccgttgctgctccgggttttgccatttccagctgcagtaatcgtgtgtgtgacttgaacatgtgtttgctgttaaccattttagaatgtgttttttcttctcaacatccccctttcctccccttttgggtgcagttgatggatttcccatccccagaacggggaagcaagatgcactgtggattttccttcatttattttctagtactcacctaggagcagacgcctagcttcacttggtttaatttcatcttaaagctgacatgatgttgtgatgtaggaagacagtaaattggggtcactggttaatgctgatattatttttgatgactctaacccttaggtcttactccaccccccgcccttctatcatttgtacttaagtatttacctggtgaaaataaagcttatgccgggcacggtgcctcacgcctgtaatcccagcactttgggaggccaaggcagtggatcacctgaggtctggagtttgagaccagcctgaccaacatggggaagccccgtctccactaaaaatacaaaattagccaggcgtggtggcacatgccagtaatcccagctactcgggaggctgaggcaggagaatcgcttgaatgcaggaaccagaggttgcggtgagccaagatcacgccgttgctctccagcctgggcaacaagagcgaaactccatctcaaaaaaaaaagaaaagaaaagaaagcacattagaagagctactacaaaaataatgagccagagtgttgattgcttttttgtaattttggaaaggagccgatgcctatctataaaatgtattaacatgcatataaatgtttctgtacaaatgggcatttgatcctgcccctcaaatttaaagtacctaatgctgcacttggatgtttcaactaaggaaatgtgtcatctgtgtcaggagaatctgtgacagagtgtgtttcaactgtacagtttattgttttttactgctattttatgcacacagacttgacttgtaagtattttgttcttatgcggtatattgtatgtttctctttccttcatctattcatcagaaactaagctatcagtaatattaagctgcattggcctttcagacttctggttaattctggctccttagaagggatctaatttttgatggtataggatcctctggaaagcatgccaactgaaggggaatgccggtgtgaattcatgtgtcacatttatacatcagaagcaccaggctcatttgccccccaaaaaagcttcatatgaagttccagtgcatttaaacattgcctgtgttgaatcagaaagtcttttggcgtctccacagctcatgaaagcaattgccagctaaatagctgcattctacaaaaggacagtgaactgcttgcttgcagtttaacccagaatcttacttcaaccaccaccatttgactagagataactaactcctgtctcagtttcaccatttctttttgccagcaatgagtcgtagaaggaatgtgcctgggaagtttagaactcaaaatgaaagtatggccagatgggttgacattggaatgaggttgactagaagagtggtgataaaatgactctggaaaaagaatgtcaccctgcattttgttagatatttattccacttcccctgtagccaaaaataaagagaaaattccttgagctccttggaggaatttcttgtgaacaggagcaagtacagcaagcttggcttagaagcctggtagaagaaggagaaaacttgaacagcatcagaaatagaagaagaaaaagacaaaatacatttccttccacagcaagttcatctagcaatggaaaaagaaaaaaacaaaaacaaaaaactgcactctctcctactccagccatgaaagcaggactcccagcccctcagaatggtgaacgtggttctgaattgtgagcgaaaggatggctggatacttaaatttttggaatgtcatatgattagaagcagcgtttggcagattgtgtgaacttgggtgttttcattaaaggcttctgctcttggattttaacatgaagagctttagagtgaagaatggatgtgtgtgtttgtgtgtgtgtgtgtatagaaactaatctgtgaaaaccttgaacatgttcattgccatggcctcccagttaattgaactttctggctaaactatgctgaaataatacactggatggaaaacttaaacctgtctattcatctacaggcatctgagcataagcagtaaaaggatcctaaaagtgtgattgagtcagtgatgcctaattggcagtcaagaagcccaagtgcccgggtgggttgggttaaaacaaaggcaatgtttgaatgttatgaatccattgtttaaccagcctttcgactgagcttttctgtcgcagtcctgagccttgatgctttaagagccatctaccagccactgagtttgcactggtgtttctcatcactttgcatgtccacctgactattgactagcaaatatatgtgtcctggcaagacccccagaaccaaagaatttactgttttcctcactggctcgcagctttgagctcaaggcatgtcttaaaacagtgcaactcacttcaaatgctttttgcttttcatttattattgcttgtcacgcgatgttctttgaaagcttgctcatatattatctgttccattttttttccattttccctttttttgcatgccgttcctcctgtttcttcccttcctccaatcctctgttcccgtctgtagacacaacggcgacgacagaaccagcagttcacggttggtatcacattactgtttatctactttctcagcactgctgagaggcaaggcaagcctgggaaaaagagaaatgtagtcttcaagggaaatcatgtttcaagtagactgacctcataaatatactataattttttaaggtttgaaaagatgtcgagtcttgtcatttctgttgtgagttcagtacccaatggatgcaagctgagatgagaccttctccccactgggtggctggaattgtaggagtttcagtggcacagagtcctccttacaaaactccaccaaaccttgaaatacatggggcttcaaacaaacgagtattcgcaggaaaattgtaacatctgaattaaaggcccagttgctttgtttatatataggccatagtcccaggtaaatcttgaagaggagtcatttgtgtcacttagtaaagttgagatggaagggtagaccagggaagaagattcctgtttaaaatcgtgagcttctgatgaggaaggtcattgttcttctttagaaaggtcatgactttaattatgttgctaatcatatgtaccccaccacccctcactggttcactcctaatctctatgtgttcatataactttatgctcacatttggcagaaaactcctccaaaccaagaatgataccatgtgtcaattttatcagcattaactgggactttaaataagttactggtgtgtgtgtggcttgcaggtaaaatagtaatacgtttttaaccacaaagtgataaaaactgggtgagtcaaagctcaggaggggcatcaggaaatatgatctctttttccccatctcaccaatgacttactggattggaataagtctattaacttttctatgtctctccaatcagaaaatgagaatcatgtttcatctgtatattactttattacttagctcaaatctagccctgacaagactgtgcttagaaaagatatgttagtttaaaactgggctgaattttaataattgaatccaagggaattatttggtaaagggcctactttaatcgctttgcctgttgttgtacagggtggaaatctatcatttaaatgacaagaggtgatcagccaaccctgccatgttaattcaacttttagagaaacatttcctggcacagactgactcannnnnnnnnnnnnnnnnnnnaaattcatgttcttaatgtgactctagtggatgtaggtctcagagttggataggctattcgaagtaggaaatttgtcccctaatctgaaaaataagaagttaacttacaggctgatcctgattttagagtactagttttaatcgggtctttccctggagagagagaaagagaaggtgatctctttttgtggtataaggaagagacacttggaatgggactttatagcatttctgtggcaggtaatagaggtgtttgtgtactgtgagaagcaactgccttcctattagtttggagacgatgttcaagttggtgaaacctcagtaggatgttattgactagcagtgcatgaagaatacacctagagccaagggatttattgtattttgtatatatatacttggaatttgacttcttaatggcagagggatagaaaagtgatagataatctaggctgatccctgtataatacacttataaatacattctttaccttgtccaaaatcctcgtagcatcttcacaaagggctccagccactgttttaaagagcatactctttaacccacagcaaagaagctgtaatgaaagccagataatatctaaaattttgcttgatgtcggggaaaaacttccaggtcagttgtcaggatagaaaaggtaatagaacatggtggaaattacaaagcaacatctgagatttccaaagagatgatgatacagaactgattttattctaatgaattgtagctgaaaacccaacttcttcattacagcaaccatttgacttagattcatttgagaataatctcgagatgtttgttgtggtgatctgggcctagaaatgttgaaaggtttgataacttagcaacttaaatgacaagacattaagtcaatcagctatgggcatcttatttggtcttaaaagttttcatactggatttccttctatatttctgtgtttttataaaaaggaaaagaaaaaataaaaatttttaaagctttccctttgaagactcattaaaatattttattcaagcttgttttgctagagtatgtatgaagtttataccagttgtttatgtatgttgaccatttgttcttaccaatatctgattggaataagcatgtattggaaggttagaagtgcatgggcatgattcaaaatcaagtggattttctccaaaaagaaagccaaacaacaatcagccacaatgtgcttttaaggatttaactgatagtaaagataaatgtgagtgttaagaatgggatttttagactaggctgacacaagggatcttctttgaataaggatcttgagcatttgtgtttttggagctcatccttaaggcctggacaggaagaatcctgtgttatgtgtgcatgttgagcaatgcaaaaaacactctgccaaatcctgataccacatggtctgagaaatgcatgagtgatttaacgcacggatggtgtagtcattatgttcttgatgtgtgggtgcgtgtgatggttttcgtttgttcatatgtgggcgcttctgtgtcttgtgccttgttccttctgccctgtgtgtcccctctccccttccccaccctcctccccaatgtgaggggtcgggtgacagcatgcccatggtctggaatagtgcttgtgcttttgctgcactgcagtcagctggcttcctctgggtttgaggtctctctgtctccgtctctctctctttctctctgtgccccttctctcccctctccattttattattttcaagtctacctgtcctcttgctttttcacctcttaatacagtagaggctgatgatctcatgaattttcatatccccaatgagtttttaaattgttcttaattcagtatgcaattgtggtaagacgcaaactggaaacccctctgaagaataatttctcattttcagttttggtttcagaatgtttggcctgtgctagctacatgctcgtaccctacgagcacagcccttagaaaactgcccctgtagctcttccttttcctgactcgtttataaataatgcaaaccatggtcaaattctaaaagcacgtacaattttcttattatactttatattcagttgtggggaaattcttaagcccattttaaagaaacatagccagcagtgcgcattactacaaccgctatgtccaccatctgtgtatgtgcctctatgtacatctctctgtatgagcacataacaatggcattcaaaggctgtcattcagtcacgggactctgcagacattgtacgttctacacaagagcaaagctcaagaggtttacgaatggctgcaggacctgaagattgtgtttcagccttgatatgcagtttggaaacaatgtgctactgtctaacggcgtgaaccaaatttctgctaatgggaagaagggaaaactctccacaaaagctgacaaagcaggaagaacaggatgactgagtttttagattaaaactcccgggggcgtctgaactcatggctggtggtggaagtaagagtttccataatatggccaagtgatcagatgtatgctgcttaggtaagagagagaccatcgcctactttgtttttcataatgggaatggtactagggccggtgggctaagtttttgttttctggaggttttattcgatcattctatttcaaaattttctggaaaaaaaaaatgataccctgaaaaactgagcccataagcatttaaatcgtatttgaccttgaattgatttaatatctctagaatttcttactgtttctaattttttgaggtttttcttaccctggttttaaatggccacattgtatcacttttagaagccagcaattactgttgaaaaggaagaatcacaacggcaaaagcattacctgagcgggcttagggtatgttatagcacattgtagcaccatgaaaaagttaaatactcatctctgcagaagagatggctatcatgcatatattaaattaccatgtttgcatctttaggactttattaattgctcaaaaataatcccatatggacaaaaagtaaactttcatttgtttaacaaagtttaaagacatatgttgaatacattttaattagcagtgactagaaagaggccttaatggatgatatgaaagtttcaagagaatacacaagaagtaatttcccacttattgttagagtgaagtctccttttgaagaatgttctctgcttcataaaatacgtctttgtctttttctttgagaaaatgaaaagtgtataatttttaacatgaaagaaaaatacctaagccaaatcagttttaggagataaattttgctcgtccccacttgcacacccagtgcttcagtaaattcttttgaattatatttattcagaaattgtccaactatggcagagtattgtaggttcacacaatataatagtgctacaaaaacaaatttaatgccagtagcctaaatggcttcctgctttagaacgtaatccgagcagtagattccagataacttgatatattttaaagtttatgccattaaaaatgacagtttccactttaatgaggtgtatatcaactgtctgttgcttttaatggaaacctttgcatatcaatgatatttcataaacatatttgtctttttgggttttttaattagctttctaatgccctccccgaggaaataagccttcagcagtaaagctacctacttgaaacatccttgtttaatgtggttcagtgggcaccaagcacatatgtaggacgctttgatatttgttgggccaggtagaagtgagagattagccttctgagaactgcaaatttataattaactacaaaggagtactttatgttgcctatttataacagttatttaaataattgtattcatcagtctttatacaatgtataagccaattagaaataggaatattgtcaaccaatcagatttcagaacaaatggatatcatctctactcagttgcctctataattgattgcattgctcactgctttccctttagttgcctaaatctatagtttgggaatacctgtgggctcaaaatcttcccatttttaatcagcacctgctgttaactattagcacccaagggtcatgatggaagttcttcttcctcaagggttgatggtgtgacagccgtctttcacagaattgacctggctatcaatgttcgtttggtttctctataaagcaacttacaaaatgcaggcttcagtgatcatttgcacatgactgttgtggttcatttgggcctttaaaaatagtgatcagtttgacattacttgtttcaaaagcatttgttttggttgcttttatgctctgattgggcattattcccaaattattaattcaacaaatactcactgagaatacactttgtgggttggctgtagcagaagggaaagatgcaaaaataaacacaacttgcttctccaaagaccttgcagtttattaggtctacagacatcttcaaaagggacaaatctgactagagaagtatgagcaaactgctgtgcaacttaaaagacctaagcagttagtcacaccggactttgagcagaacagcaaagaacaagtaaagccacattgaatgtctaacattttgtgttattaaataaacttcattaaaggatcagctcacaaataaagcaaaaggaaatggaaaccatctcctatctgagcctcccattgtttatctacttccctcttcaccccttttaattcaaatcagagctagctgagaagcatctcagctggccagcattggaattgactcggatataggcatttcaagccccgatttgattacctcctgacctaactgctttttcagctttgagggttttatttttcaggaataccattgatttatgaaattctcttttttaaaaaaatcattttgcgaatcagattttctgatgaaggcataacctgcaatctgcagttagcagatgctgtaccattttgaaatatgtgatccaagatcatcataaattgataatgaactgtgtttgtcagtattggcagcggatttcaatttacagtaaaatgcgaaataaaatgtacatacatcagtatgtaacatctaaatacatttttatttaagagatatcagagcatcgacagctaacaatcaggctttattgattttctttttgcatgctgttatgaatgagtgattttaagcattcaccttcatgtttcatgtcctttgaacagtggagactgaggaatctttctgcctcgattgcgtattaagaacaaaattacataattgaagaaatgtacttatggattaatacattcatgctatcaaaaacatagatagcaagagatttggctcatgtttttaaagaaattcatcctcagttcttaagtgttttgtttatgtccctcgaggaatgaaaagaaaaacgatttgtttttacttgtaaggccttactcagttgcccaattccgcagaagaactggacagtgaggacctctcaggtaagggctagtcattaggtaaggcactgcagtgtccaacctgtgggtgctctatccacttctacaaaatggccgtttggtttgctgagcaatcagtgtggattttgagactaacaaaaaacaaatttgtatcaatactgtcttcctccccggtcacccactcacctgttttctctgtggtagcgatatttatatttcggaatggggacaatttaattaacgcaggagaggacaagttacctttgggattgtactaaagcccctctgttcagtggcttcaaataatgtttatgtcctagatatataatgtgtcgggagaaattttgttgtattacaaagcaatttaaggatgttggattatgtgacaagatcttttttaaaaaaaaaaacaagcaactcattgactgcctacttctgtggaggggactagaatagccatgttgtagttatcttagaagtcaggggtggggaagggcagggaggagggggaagcaattgttttgtcacacaccatgatgtaaactaattatccacctcagacctctttcacagcacactgagctcttgcaaaagtaggtttcatgcttgattccaggatttaggtgttactaatccagaataagaagcatatcctacaaaggagggagggaggagatttaaagtggtcagagctaaacaattatatgagcttccatgatgttgtgggacttaactgccaaccagctatggcttaaacctttccatccatcacttaataagtcagtaagcaaggcccttcttgttattgcagtggagaaattaagtcataggactgtagacacttactcaagcctattggaaagaaagattccagaggcgcttttactgaagctccttttaatagttggctattgaggtgcagtccttaactataagtctgacccggtgagagaataagatagtactactcgatttttcaaagtgcaattgatttattgccaactacgtgcttctgacgaacctcagggatatcttcactttgctgttatgtagcctgtagtttgagtttagctgtcggatttatttttctacagactggaagctccaggaggccatgctggttttgttcactgttgtacacctgtcatgtactaagtacccagttgacacttattggatgaatgaatgaatttccaaatcccaatgcatagataaataaatagattagaaagatagacagccaatcaagagagtgtttcattttttgccacttctttgtggtgtagttggagaagttgcaaaaacatttacctagttttattttaaaataagggtggataagtccttctccctacgtaaaatgtgatgctggaagtaagcaatttctgcttgcatttctggtgatagacagtctcagttctggttgaccgtaaagaaaacaactctctttgatacagtagccctggcaattggatcttctcaaagatcctaagaaagctggtgggtgtgttggccctgatccctcttggcacaatagccagacaaggatcactcagatatgcaaaagtcatttttctcctctttaggaaaatgtgactgaatcagccatccaccccttccaccagcatcatcaattaggaatactctgggcctcagcactgcgccatgtcagatgggtccctgctgcagttctatcaatcacccaagtcagaagcaataaaccaacaactgtttgtgttcataataattcagttaaattaataattatgttgtccccctcccccactccctgcaggaacactgcagtcatatattgctcaggagccgtaagtcatgtagaacactgatgaactatcaggctgggccgggctgcctttgcatctggtttgatgaactaatcaaaaactgattagcacctttgttcgaaggggatgctgattaatcaattactattgattgtgagcttggcttcactcagcagcaaagagacatctgaagggaaaaaaaaacaaccaataaaaattgagcagctgtcatagtgtttaaatttattaaaacaaaatacattatttttatgaagctgtcttgaaatgggtcactgaaggggagcatattgattgagaaaggatgaacttctcaaatttctgtagcctagagactgaattcaattataatacaagacaaaccggttaacacccgtcttaaacagtccatcaataaattagagtaggtgttgcacatttaatgctaaactgtggtaatgaataatatcatccattccctgctgcatcagggtagaaatttcctcctttccatattatggataaatgttacgtactcaatttccttccaaataatgatggtctattttccttttgtcccctttgccccgacctcccccacgcaccagtgctaccttcattaatgacagtttcataagcaacatatggtgctccattctcacccagcaaagcaagttgcccagctgatcctcctctttaatctgcataaagaaattatgctcgtatgtagttcagtgatttaattattggcaggcctggggagcttacccagttctactttgaaccctttcatttactttttgggtgttaactttattgatgatggatccataagagttttgaattgttttgtcaattacatctgctctttcctggtgacagctggtggttattgccactcatgtggaatagaatagctttaagcatatttatccttctattttattttaaaactttttcaaaatgtctccaactgcctctctcccttcagcagtggaggggccttggggaactgtttagtggagtgaggtggtaaatatacagtgtgccagaaaatggccctccagcacagttcaagaaatccatcagtcttctgatttggaagcaaaggcaccaaaaagaaattccagagctgtcatgattcctcaaaaaatgttatcagctcttgtcctacagacaagaaagtgatctggaaaactcctacaacatgtccctcacgatccaaaaaagaaagcatgggcctcggagggcaattctaaatggctttgctaaccctcatctaggtgttaggaagaatctaggtgaaccaactgcagtcccctaaatggattatacaagaaacacggcttcaaaatatagcctatatttagctgggcgcgatggctcacacctgtaatcccagcactttgggacgctgagacgggtggatcacttgaggtcaggaattcgagaccagcctggccaacatggcaaaaccccatctctactaaaaacacaaaaattagccaggcgtggtggcatgcacctatagtcccagctacttgggggcgggggagcaggggttgactgaggagaattgcttgaacgaggaggtggaggttgcagtaagccgagatgacgccgctgtactccagcctgggcaacagaaagagactccatctcaaaaaataaataaaataacaaacctacatttagctaataggagcacttaaagctcttttgatctagattatcagtcccggaggtggggatatatggccttccggttactgggagtgtcttaagtcctggctaaacttacttgaaatgtgtgtgagaaactgtcagtagctgtaccatttagggggaactctttcctaacccccacataaagagtggcccagatttggcaaacaggctattttattcccttggtagagtaataacaacaataatgataataaaacattaaaaaccagatgagctgtatagatatatttaagttatagcccataaatctaaagtgtggcatgatatggcttgtatctgtatcatactttgtaacttagaaagctctttcacacatattacttcgtttgatctttattcattcaacaaaattatttgagatccttgtgctgggctctgggctgggcaccagggatgctgcagtgaacaagaccaacaggagctggagctgccatggcgtccaggagccagggcccctgctctcctaccgcgacaccctactgagggagacagacccaaaacacgagttaatcttggacagtgacaaatgctgtgaaacaataaaaccggataaagtggaagtgagggctggggctggaagaaggtggaggtcagtttagaaaagtttaccagggaaggccattgggacaggaagacccagatagatgagaatgagccagataatagaagattttcatgaaaatctcctgagattgttaaggaagggctcttggtctccatttataaatgaggaaactgggacccaaacggctaaacggtttgcttaggagacagtgagaagcgaagcatgggtcttcctggctctagaggaaatagaggactttggtttgcaggggccacctttccccctatgaaatccacagcttcctgtgtgctggagcctttggtaatcctcttgacccttttcaattcactgtgcgcacccggggaatgagggaaaagtcaggctctctgcagcccatcaggcatagagcaatgtgctgactaacctgggaagattttttttcccagcatcaaatcaagctctttctcctcaaagaagacctaaactctgcttcagtagtttagtactgttgtcccactgattcccctaaattatgggatcagtttcccctgggaggtgaccctaagtgccatgggaaagtgatggctggaaaaggttaaaccacatcaattcccttttaaaactgagtttcatacaaggcagtagactgaagaaatcacattgggtccatgccagctcacccacgacttccccacgatgtgtttgaactgcatcctgctgctggtctttctcataatccaacatgctcctgtttccaccgtgggaagggaggagaccatcaaacgggaacttttcttccaaagttaaaaagttggcaggccacggtgagtgtgaattctagttctacaggttggacactgctttggggtgacttcaccatattcattaatccatcctcctcacacccccaaatgcctgaggtccactgaagcatctttctccagagagagattctagtgggaaatgtatgtttggaaatactcgacaactgtcctgtttatcaggcgtatattcctttaagggaaactctggtgtcatcctcagtgccttcctgttgcttaaaatggaaaagatgatcacatttctaaatctgtgctatcatgagatgaacagagtggactcaagcacgacttctggtgtctctggcggtgttaaatgccttgggagaaatcttgcatcctgttggatcaagtcatttccactcatggttaaattaactaaatcaaggaatttgagaggggaaaaaatcaacaagaaaaaacccaaaacacttgttttcatatttagctacaatagtatttaatatcctgatactcaaatggtacacccgaatcgaaacctgaatcagacggccttcacctgccaggcccacagccttgaccttcataaaggacagctaagccattagttacacagtttgtcaattctgtataaatgaaaagaacttggtgacttcaactcagtaagtgtttattgggcatcttaccatgtgtgggcaatgctgagtatgcagtaccacgcttacccctaacgaactggtaattatttgccttgggtcggtgataagaactggaaaagccctccttaggctctaatacaggagatttgaatttggcaaacaccaggtccctatgatactccaagccctgagccaaataggcactttcatttggctcaggaaatgaaaacagtggcctctcaaagtgaccctgtgaagtacgtaattgtactcagtggctcagagtgcctcattgacctgcctgaagtcacagagaaaagtaatgaagctcaagttctgtcccagaaatgacagcaagtccagtgctctttccaatggaccatgcaggagatgagctcctagctcgtcccctgttcaggcctgtttctggaaagcaatgtagccagtgatagtctaagagagccctgagtcctgatcatttgagtagtgacaaggtacagccaaaatctgtgtgcagtacttctaatttaaatgaacacatactgagctctgggtggcaccatgaggatgatcactgcagttttcctttaagtagcttaacatagctcctttgaaacgttagtatagatgcagttacattgctagaattgaatgcagctgacgtgtagtagtagatgcctgggatgctatatgggagtcttcatgattttcttgctttacgtttattccttctcgtccactttctaagaagacagaaaagaaaggttatgctgcataaaggctagtgtgctccaatatatattaacatcttaatgggaaagctgtgcatgtactgtatacatttactactctctgacaagagggaattaaatgtcagaaggatttgtagcatctataattgaattggtgctgagaaaagcaaatcttaaagaagaataacatattaggattagcaaataatgtggcattttgtcagcgcatgccattcagtttgttccccttcagtaataaagttgtgctttttaaaatgcacacttatttttgttgccatggacgggagctacaatagatgatgagaatgggtagctacatttttcagatggtgccaggttttcttaagtgtcattttttttttaggtcagattatggttttgcttcagatttgggaaatccactaccaggctttttctttcttcctagcaagaagtaacaaatgacatcatagtcactaagctttctctgaaatagactaatccctacaaccctaggaagctggaggcagcatttccattacaaacaccgattctgagagtttgtaattaaactgacttgtccagcaagatctccacccaggaaaggaactaaaactgagccacgtgacagaactgttgcaaaaaagtccgcaacaattcttttcctccagtcatccacggatgggggaagcacagaacgctgagcatctgaactgtccctaaacagaagtaggaagactaataccgttagaacctccccatggcttaaacgtaaaaatgagagctgaggtagtttatgacctatgaaaagagttaaagtgtgcgtttaagcgccatgttgctaaatgtgccttacagcctgagccagggatgtttgagatgtgagggtgacccagtgcaatgtggctgtcatgcctcatgctgcatactttattgtgtatcattgtgtcacccttcactccttctcagaggtagaaatcttggtgtccttttggcaaaaagactgaccttggactctgtgtagccgagggcttcagggtgggcaggcagcagttgcagtgaaggttctgctcagtgagtccttctgccaaagtccctatttgccaggagcttgtctaggatgtactagccactctccagttatccatggatccccactttggcagcagagccttctaggcttatcacagatccatgattatggcatttgcatggcggtttatgctacacatctcatgccaggtggtaaagtagccatagaaaccaggatctcttgcagagccctgtttaatacaggcagcatggctgccagagtgctgcgtttaagacgactctggcaaggagtttgaggaatgaaaacaagtagagaaagaaaagtctcctagaaggaggggaaaggagactgaagttccactagcagtcacctttcttgtcacgccctggggaactactgcctttagaacttccccttcttattgcccatgaggaatggatcaggccaggtcaactggcccaaggtaaagaaatctgagcagtttggggcatcactcttgggagtttctttgagatttctctgtcccgcaatttctaagatgctaaagcgagcccagggttgttgaagctgtgacccaagcagtagtggccaacttaacattctgcaagcagctggtaaactctcacctggagccaagttgtttcagctttttgccaaaagaaaagctaactcacgaatactaaacagctcatgatttatctgtcacacttagagccatggaagtggctgcgggatgggacacgacaggcagggagggttgtaccacaactgtgagctgtcaggaacacctccctgcaactgctgcctgcccgccctgaagccctcgactacagagtccaaggtcagtctttttgccaaaaggacaccaagctttctacctctgaggaggagtgaagggtgacacagcgatacacaataacctttacagggttcatctgcaagtcagaatcattcaaggactaggcctaattcacctgaggtcacatgtgaaataatttggatgagattcttaactccagttgaactgtgttatgcaatcatgcttggttcactgaggctggaataacctttatgctggaaccattcaccaagcaaaaacatggctttacttttcaggatgatggggcagggcttagtcccagaaaagaaacactcttacacttgttactagtaagaggaacacttgtagcctcttagggaacaagaaaacatggctttctaaaccgaagtgatgtccatatgcctgagcatcaggcatgtttaaaagtgctttccactcccacatttatttttcaattgacaagctaggggcagctgtagaatctgcctctggtttcgttgcctgcccgattcagaaaatgagccgggaatctgaagagaatgtccccaggaaagccagcacttcatgggacctgaagaaggggtctgcaccctgcaggaccaggatctgtggctcatggggaaacccatagctttcccacttagaagtcatttctcatggaattggttagagtccttgccttgggaatggaaggaaaggtcaagcagctgacagactttgtcgcagccatgcttctcttagtgctcggtatttccttccatttctggttttcgtgcgactccagtagcccagttcccccctgggcagcatcttgcacggctgcttcatgtcatgagtgaggcacagcccgcaggtgcaggcagctcaccccggccctgctgccttgagccaatccatggcattataaacactcccccaccctccccacacgtggaaataaaagaacggactgagatgactccagaaacagctctgcttttcatagggaaggccaagacagaggcactcagtgaacaggcacaactctattaacacctcccacgtaaacccaggaggtgggagtgggggtgggaagaggcggtgaggcgctcgtaaccggcagtgttccctgtaaattaaacatcagttaccttctgtgtccatctgcagtaattgaaggcaggagaaatgtcttggtgattaactggtggtagtaaactttctgatcaaagtgggtatcagaagatagctggagagattacccttataaataagtatctgtaaaatatgtatgtccttgagggtggggaagataactagaacatctaaggttctagtttaatttgggcaaagtgcagggaaaaatagcaacactgagcatatttagctcaaagttcatggagggcaaaggtcaagtaaggagtttcggctcaagaaattaatctcacagatacatatacctcgtgagatctttttgtttgagggaggtttttgtttttctttgtcacagagcctctctctgtctctcccctcccccctcccccctcaggcttccagaatattcctgtgtctaggcatggagaggaggcggtcttttattaagagtggacaagatagtgtcttcccctagatgggttagaactgtcctggacagcttctcgaagcttctctctgttctcagtcttcctggaacctctcttcacctcttgcctcttgtgcctaactttcccctgtcctcaatgtctagtctcacttgttttcctcccccaattttaaaacatacagagttcatcgaaagacacataaattttaataggtctgaagctcatggccattggagatgagttaattctcattcccccaagattccctattttgacagctccctaaggaaaacacaacttgctggcttttctgttacttttgtcccccatgagcaattttgcatctgtgcagttggactgaacatctccagtgtgtcaagcgctctcctccagcagacaccccgtgtccagcagcaccccacggggaatgctccccttcaacgagctttgtcgtctctaaaaaggaaaaaaaaaaaaatcccttgaccgagttctgccttgttgaaatgactttcaagacaatgggggttgtagcatctgcagttggcaacacttttggctgaggagggagattcctctccaccacttttcaagttgagcttattagacacgttgctggaggggctcgctcagctcagagcgggctaattggctgcagtgcactctgcctccaacccagctcccttctccaattaaactcccatcatcctgttgtcctgggcgacctgctgctgcctctgatttggcatttctgtttgggttttggttttggtttttctgtagtcctttcaaagataacttaatgaaacactttaaatactccattttaaaatttaaactcttttaattaaagcacttttcatggaaccctcagtcacgagttatttccccacatccttcagtacttaatctcggagcagaattggaaatatcgatagaaagtgtaaatcatgccctcctgctgaaagcgttgtatcaggtttcggctcaaaagagcaccattacctttagctgtcacggatctgtacacttgatcgataaacttcaaatattattagaggtagaggcttcagagatttgctctgttctttggagagagacagagataaatctttcttaaaaattgacttgaatttgcactctcagtcttcctggtgaaatgcatttctcttaggcatccagcaactgcaagggggacagatttataggccatgtgcttcttgtactgaaagattcaaatggtaaatccttcacatatgacttcacaaatcatgtaaagttaaaagatttttaccgtttctgttgctgctgtgcttaaattgtaaggtacagctagtaaatcattttaatggaggtgtcgtacttgactcaataaaaaaaaaagacaatggtttagcttccactccaaaatgttaatgtattaatcaacgggagaataattgttttttactacattataaatctcaaatgccattaggatttcagcaaggggtgatgtagccacattcctaaattaaaattgtttacactgccatacatccattctgcatcaccatagctcattctgggttcattttggagttgttccccagccaaacatgtcgttcctcagtcagaagaagacatcctgagggggtgatgcttataaaggaaaattaattgcattgcaaggtgttaaataaataaaataaccgtcggtggcaatggacaattattccttgctgtctcttttgaaataggtttttaggttttaaattgaggcttactccttcatacatcctaaatgtagcaagcctgtcatttgtctttagtcttataatccttgttttatctctaggcaactgtggcttttgagcaccttacttctcctatgcatatccctaatctaccagataataaaagtcattgggcgtctatagaaagatgctgtacccttctgttgcctaaaggtgtcattcagagcaccctcaaatagtcaggtcagcccccttaattaggctctgcaactggatacagacagagtgaacgctaagactaggtcagggccggatagactatttcttccttccctgcctccctaagcttgttccacatgcattaaccctcctatgctgcttatcatgaaattgcctcgtggggagaacagatcgattcagcactggacaggtcagcctgttacctcagtgtaacttgatccatctcgattgttctctgtgactcctccattaaaaaagaaggtgaccctctgaccctggagacagtgtcgccggggcttctggtgccttgtaataagctctacatccctattcctcttctgattttaacagattcccgagcaggtgaagaaggctcgatcagggcagtggatcatgccgtgatcggtggcgtcgtggcggtggtggtgttcgccatgctgtgcttgctcatcattctggggcgctattttgccagacataaaggttagcaaagcttcagcagacagaagcagcgtgtccccacagcttctgcctttggagactttacaaggttgtccttgataggcaatttgatgtatgtggccacacggcctatctgattcctgaaactgggagagagagaagagaaaaaaaaaaaaaaaaacaaaaccagaaatcttagcagccgctgattaggactctgggagttgatgagtagcactccttgatttggattttctctaaatataaagctttgtagagttgttattctgccatccataattggggatagaggaaaaatgataaagtagaggctggtgtgcaaggtgtggcatgaagccgcaaaggataaacatggaaaaagcacatccacaacctactgttttctgggaggcagaggatttccccctatcccctgtccccagactctgtgtaagctggtcacaatggcgagaagactgccttggtttgatgtgcccaggttaaagaaaattttttgccttaaaagccgcataaatatgtatttttaaaattatcagtgcaattgatttaaattgccattaatcatcacacttatcaactgtgcagtctggatgggcaatcatcttttccaatgcccctcctgtctgccccatgctgctctgatcctcttcttccctcttggtaatttattcttccttttctttgtccgcccctgtctctctcagttatttttctcaagcactgtgcaatgagcttgcggggttttctaggtgcttgcatactgcttgactgttgaacttgggtttgggggaaggtcccttgagcacagcagtggaggtctaaggtacttaggcacctttaggatacagagtgcctgtctcaagcataaaacagtttaggacgatcagagctgtccatacttcgccctctgcccacactcaggaggcagtctgtttggccaagagctcccagcctctcggtggtaagcttgacagagacaggaggtaaggccagagagcagggcagcatccgagcagcagctgtgaaggaccaggggaggggaacatgtgtgtcactctgcagcaagaaaaaaggatactgagaagcgtttgacctcttgctttctcagatttgttactttgaaaacctgaaaatatagcaaatgtctcaacctttttaaatagaagactcttcaggaatacagtatgtaatgggaggaagattatttgattatggtaggcagtttaacttctacctatatagcatactgaggtgcagtctttgttgttctccatgtaaactgttgggatttggtgataagagtgtccccagctgtgtaatgtctgtctattgtcattataaagtggctgtgccaattagcaaatccatgaatccgggtccgggctagagttatacgatgagagagacctacttgctcattaagacagatcccaaaccttgatccctgctattataatgtcaaattctttctcaatctggaacctcactctgaagtggaagacaggaaaatcaaacatacttgtgcaagttcaagcaccttctcacctatgggtaggcaacaatgattcatatagacacgggacggtggttcaaataaatgagctgaggtgacaacagaagcatcatcagggccctaattcatttattggctaattgctcttccttgctttggtctttaacaatgtacgtgcacatatctggtcattggtcattggtgtttactgtttatacgttagtcagcccctctccagctttctgcatttttagctcccactcacgtcttcttctgctgacatcctctggtcataatcactgctctaatgtctcatttgctgaattatatcgcagcggttcagttggagtggtgcctttggaacccccggatccccctttgtctcacccaccccgctctcttcttccaattgttttttcccctctgctgcctgcacaccacttcggctgatgatggccataaagcaagttgccatctctgtaccactttacacagaggccatcagacagtcacggtgctttaccccttcatctttcaggtacatacttcactcatgaagccaaaggagccgatgacgcagcagacgcagacacagctataatcaatgcagaaggaggacagaacaactccgaagaaaagaaagagtacttcatctagatcagcctttttgtttcaatgaggtgtccaactggccctatttagatgataaagagacagtgatattggaacttgcgagaaattcgtgtgtttttttatgaatgggtggaaaggtgtgagactgggaaggcttgggatttgctgtgtaaaaaaaaaaaaaatgttctttggaaagtacactctgctgtttgacacctcttttttcgtttgtttgtttgtttaatttttatttcttcctaccaagtcaaacttggatacttggatttagtttcagtagattgcagaaaattctgtgccttgttttttgtttgtttgttgcgttcctttcttttccccctttgtgcacatttatttcctccctctaccccaatttcggattttttccaaaatctcccattttggaatttgcctgctgggattccttagactcttttccttcccttttctgttctagttttttacttttgtttatttttatggtaactgctttctgttccaaattcagtttcataaaaggagaaccagcacagcttagatttcatagttcagaatttagtgtatccataatgcattcttctctgttgtcgtaaagatttgggtgaacaaacaatgaaaactctttgctgctgcccatgtttcaaatacttagagcagtgaagactagaaaattagactgtgattcagaaaatgttctgtttgctgtggaactacattactgtacagggttatctgcaagtgaggtgtgtcacaatgagattgaatttcactgtctttaattctgtatctgtagacggctcagtatagataccctacgctgtccagaaaggtttggggcagaaaggactcctcctttttccatgccctaaacagacctgacaggtgaggtctgttccttttatataagtggacaaattttgagttgccacaggaggggaagtagggaggggggaaatacagttctgctctggttgtttctgttccaaatgattccatccacctttcccaatcggccttacttctcactaatttgtaggaaaaagcaagttcgtctgttgtgcgaatgactgaatgggacagagttgattttttttttttttcctttgtgcttagttaggaaggcagtaggatgtggcctgcatgtactgtatattacagatatttgtcatgctgggatttccaactcgaatctgtgtgaaactttcattccttcagatttggcttgacaaaggcaggaggtacaaaagaagggctggtattgttctcacactggtctgctgtcgctctcagttctcgataggtcagagcagaggtggaaaaacagcatgtacggattttcagttacttaatcaaaactcaaatgtgagtgtttttatctttttacctttcatacactagccttggcctctttcctcagccttaagaaccatctgccaaaaattactgatcctcgcatgatggcagccatagtgcatagctactaaaatcagtgaccttgaacatatcttagatggggagcctcgggaaaaggtagaggagtcacgttaccatttacatgttttaaagaaagaagtgtggggattttcactgaaacgtctaggaaatctagaagtagtcctgaaggacagaaactaaactcttaccatatgtttggtaagactccagactccagctaacagtccctatggaaagatggcatcaaaaaagatagatctatatatatatataaatatatattctattacattttcagtgagtaattttggattttgcaaggtgcatttttactattgttacattatgtggaaaacttatgctgatttatttaagggggaaaaagtgtcaactctttgttatttgaaaacatgtttatttttcttgtctttattttaacctttgatagaaccattgcaatatgggggccttttgggaacggactggtatgtaaaagaaaatccgttatcgagcagcattttatttacccctcccctatccctaggcacttaaccaagacaaaaagccacaatgaacatccctttttcaatgaattttataatctgcagctctattccgagcccttagcacccattccgaccatagtataatcatatcaaagggtgagaatcatttagcatgttgttgaaaggttttttttcagttgttctttttagaaaaaaagaaaaacaaaaacaaaaacaaaaaaaaaaaatcacaccattgctcacagaattggcatctcatttttgggacctcccatctttctgttttgaaaagtgtacagtagtgcagtgttcctgatgtaactttatggcttacaatgttgacatgtctcaggttcatgtgttgcgattggtgttttccgtctcaggtagattgcaaagtgtaggccccacacattggaaaaaataataataaaacaaagcaaaaacaggaaattatggattttagttgtatattggtttatgtattttttcttaagtatacagtgcactgtttgaaatgtattgttgagtattactttgtacaggttgatcactttttttagagtgaagaaagaacaaacttgttttttgtgttttttaaaggaatataaaataatgaaggatgtataattgatgccaaataagcttgttctttagtcacaccgacgtcttatttttccctttaggccagttctgtttttaaggtgtacatggacaatgttacagtgtaagaaactccatatccatatgttcccattcgcattttgtattggttcatgtataccatttttacaaaaaaaaaaagaaaaaaaagaagtactataaaatatctgtcttcttaataaaaaaaaattaatgttacaaagtgatcctttaatctctttatggacttcttatggacgcctccgagtgagagaagagatgggcctctggtcccagcttcctccttaggaccatgtacggggccaggaacgctggcagtagatgctaggacatgctgccagctgggttgctgggggccgcgctctctctccttctccgctcatccttcctgtccttgttctcttccccactctcagtggacaggtgagccaagtgctgtgccgtggctgagtctgggctcccacgtggactcagtgatttgtgcaggtgtgcgagctgtcgtggcgggcccgccggaacaggccgctcccgtggatgtgtcttccgcactcatcccctctctcaccgcccccccaccctcaccaacttccctgtgttggctgctccacctgtctcttactttgggagtttgtgtcttaacaattcattctgccttcttcctttaaagttctctctcctttcataaaaagaagacgtgagctgtggaggactggcttggctgcctgcagaagattgttctcacttgctgtttaggttgctgagacttccaggcctgggtagacagcaggatttgctctgttgtcatcgtccttgccttgcaggctgaagtgagcaatgactacacttcatggtggccgatcttataaatgtgcagataacgtctggccaggcccaaagtgcccttttcccaccatcccctcagctgtggttgatgagttccccttttctcccttggccacgtcatggggaaagttccataggaaaagcaaaggtaagctccagaaagactgaaggctgtgcatctccccttgagccacttccatcctggcctggtctcttacctgtctctgttaaaaaaaaaaaaaaaaaaaaaaaaaaaaaaaatcagatatgcagttattgagcacctgctgtatgtccagcatggtgagggatgcagagaagtataaggcggtctctggaggccaagtagagcatcagttacatcacctgaaaacttgaagtgaccctgagccatgggtgccccactgaacacagagaagcccagagagtgctatgagaattttctggagaagggtaatcagtgaaggctggtgagtccctagacagcttcacaaagagctgggaccccagctggatcttaaaggatggtttcgtggagaaggaatgtgagtcaaaagtacagagggcaacaagcccagccagcctgctgatttgtatggggagaagaaagcaattccgtgtgcagggtgggatgggtcttgtggctgtactgaaaagtccgggcagaggactcgatacttcagtgacctctcccagcctctgccagagggcaaggagcagtagggagtactcattcattgcatctctataaaaagacccagagagatagaataaggatcaaaagcacacactagagagaggctgcctgcattcagatccctgtcccaccatgtagcagtgaaacctcgggtgagtagcccagcctacctagcttcagtctcttgctctgcaaggtggacatcaccatagcctcgaaggttgttaggaaagatcagtgagatatgcagtcagcgctcagccaaaaaggtgccagacacacactacttgttcattacatgtcagtcacaggatagaggcaaatggtgactaaaacgatagaaggttacccagggctacgaagaagcggtcactactcagagggagctctgagggctcctctgcatatagacacatcatgcccttgcaaaccacgacttagaaggtttaatgacccttttctcttcaccattcattagcagacttattccaagccaagtggcatgcagtatgtttagtctccccacccctctccctcttgtctgcagcatgaggctccagctttagctgtaccctacagaaaaaagtcccagaagttccttgagctgaggcagacaggaggtggtgactgctgtacatttgccttttgagctccacagggtatgcaaatgagaaggtgctagaagccgtccccgctcaaaggatcttgataagttgcccactccttcatttgagaagagtgcgtacgagagtgaaaatggccctcgtttcccccagagagttttcacaaatgttttggcctggcattctccaaatacatcaactggaaccctgaggtgatatgcgggtgttaattggtgcaatctttcactgtcctctgtctacctgaaatgtaattcttttaccgctgtggacttgctccatggagaaatgctcctttgattctgtcatcaagaacctcaaagaaaccatgtggccactgtgttacaggtagaaagaccctgcttaagtgaaggtatttttgttttattataaaatcatgcccaagattaatacacctttttgccaggatcccaaatacgcagccctttgtcatgaagaactggcagccacattccttcagggtgaaatttgtattcacagccatacatgtatagtttttgaagcgctggccccccgtacaggagaagaaagaagggactcttggctcatccatgaccttgtaggtcaataccatattaaagttcctgtcaggcacgcagtagtcacccagcaagtatcagctgattaaagggagaagagtcgagcacctggctgactgagccttacgttacacttaatctgaatgggccaccgatgctgtatttcaaaccttgatgtttgcatgtccatccttactacaggtggctttcaggttggccgtgaagggacaagccagccagtcctgagtttagagcgattggccctatcattctcaaggacccactggaatagtatcagggaatatcattttgggtaatggccaagcaaagccttagtattgctatcatatattgtgaggggccttcagaatgcaatatggcctcttttaaaaatgcaaactatagtccttgccttatctgtgtttatctcaaaatgttgaaatgtgcctctaataggaactgcaggattcagtccccccccaccaccccccacccaacactcacatcattacacatgagcatccctgaactgagacctgaaagcaagaatcttctctgttttcaggtgttccaaacctcagcttccagcctcttcagtacacaggaaactttgtttcatttttatgtttttatttatttttttcattcccaaaaaacataaaatgtctactgcccctggtggtcagtgctgggaaatacaactcgagccttgcctattgaaatgcagaatgtattccaacaaggaacctgacattgtctactgctttttctctcacacacatgcacacctacctgcgcctcccattttactccctcctaatccttcgaagtgttgatctggggaaggtgagaaccactactgaggggcaaatcaaccggttctctgggcccgggacttcagctgccctccagacgtgcacaggctcacagtcatatttcagacgtgaccgcctcaaatcttccttaagtgctatcttctcaggttaattaatcaccaggcttaaacttgctgttaccagcaggaagtccatcctgaagtcagcaatgttacgattgcatcttctaatactgtttatcctgcattagtgtttacttagggggaaaattgatccgtaattgatatttcagtcttccagagctggtgttggaagagcctaatgcaggcctttaatagcaagcaaatatttaaatcccttaatggttgctgaatattgaaatgtgtgactttattactctttttggtttgttttctctgtagttgtgtatttcatcgtttaaacctgcaatggatgctggcaagtgcaagtctagctaatccacaaaagctgtttgcccagacacagcagacctgattaaaaagtattgctatggaagggaatcttctgcactaatcagtctctgttagctagtgacgaaattactatccatctctctctctttctctttctctccctctctctaggcctgttttctctaacctcctctcccagaataaagtgatgagggcagctatagtgttgcaattaggaacatgaatcttttatcgtttggacaaggaagggaaaatgccattactgtcaactgaaatgtcctacttgggttttttgctcctacttccctgccaaagcccattgctgctgctgaaattgtataacattcacagctgttcttgatggcttgattcttaacacagccagaaatgtagcccgggagatgcttaagacagtttatggaaaataatagatttccttgcagagacaccaatgcatcgagaagggccttgagtcacgttagccccagccaagatcaccaattttctctctatctggcttcagttacaaaggctatgccttaaaaaaaaaaaaaaaaaaaaaaaaaaaaaaaaaaattccaaaccctttaaaatcccctgtttttcccgggtgggttccatcagcacccacaagtccctggctatggcaccttttgtctcaccactcacctgcagcagccgtgagacccaaaaagaagcctacagaagtggaaataaaaggatgctactgaggggagaagaagaactcccaggaaagccacccgatgagagctgagactaggtctaccaccagctgggtgctccagagacagacggctatgttggaggccacccctacagtcccagcacatgggtggggtccttccctccctgtgtggcatccccgcgtggccatcaggaatgtcaagaagtggtgtagttagttccactatcctcatcactgtgccctgaccactctcagccccagcccttagttaggaacttctgggattggcactccctttggcaggtaaaagggagtggcttcacagtcacaaatattgggaaggatgcaagaatgaaacagcaaacagtgcctcacaagtttgcagctttcagactgtttctgcaaaagcatgtcaaaagccatgtgtctctgccccaccgtgtctccccagtcgtgcctggaagtaaaggttggaagatacaggctggcaggcaacggccagctctctctccctttcactctagtatcacccgcagacacccccagcgagtgccaccactcccccactgttttcattctcagcttctcctaaatggaaaccattaatcatactaaattgtgcaatgattccgtgatagggagaatgctgatggcaaaaatcattctcctttgttgtgccaggcaggcaaaaggcagaagtattagctcgtcgccctgcctggctccttgcaaatgctgaccatgtgtttgcctacgcagctgcctctatgcacacagcttattttagcactggtctaaggcatgccaactgttgacagaaaacaaggccacctcttccttagtcccaggactgccaggaagactgtaactgctggtgctccctgaagtctctcccatctcaaggtccccatatcagaggtaggggtgatacaggactcgtgggcaaaacccaaggtggtctcagatggggtgagctggtggggtaagccgtgccccccatgcagttctgccaactggattgcagaagaagccaggtgtgggtaccaaggaggctttttgcctttcagaatttgatgtctgcttcactttcgacaaggctctttgtaagccaccccttctgaattagaatcattttccaaaagctcttaagctatgattaatgccagggctgtttttaacaatcatcctgccagtcttaagctgtagtcattttcaataatttggagtgctcaaaggcaagccaggagtttgttgacaacaaaacccgtaagagcacagccaggcagccacaaaagatggaaaagcaaagggaccatttgggcttagctggctttctgctcccagagtttcaccactaaaagtttgattgaacactcacagtgcgttaaggatccaactgtgaacatggctgggccagagggctgccaggctggcttttgtgtgaacaaacaagcagtgtgtttggagggctccgggtttatttatggacatgtgtggttcattcatgccatccccaaaccagagtgtcctcatttgtctcccctctgccaacatggaagaccaagaaagaaatgcagttgcttttctttggggctgtttacctcccatgaatgccgagcaagtctctggccaagatgtgggaatcctgctctgtagatggccccggccatttccccagccatgtgtgttaaactagtgttctctttttaatcttggcaatttcatggtagagtatccatctgtttgaaaagcccaaactgaaggaagctaccgtttgaaatgtctgtgattacagatttacttagactcagcttccgatagcacttatttctagctcattacttcctccggaaggaaagggtcagctctgggtgatgggagtttaacccaatgaatttggtgtgatggatagatatttgtgtctccattcgactctgccatcacaccaactattatgtagggtgtgttgccagccagggagaacacagacgcttgagtatagctgggagcttttattagctaacttccaataaactcccttcaaccatgaatcacagcagagcctccgccctgcactccacgtggccttagcagtatctatcacaccccctccctgtctctattcacttcaagcccctttcttctgaggcagaatgaacagatttctagtgttgggcttctagagctgtgtttctgtcttggctagagggacccgaaaggaaactcgtaacctatccggactctgtgtccctacaccccataagtgtttgctgggttttcccagcaacttttcgggggaatctttgggacatcatcccccctagcatggcacccgctttaggatcctgaggcttggggaaatgaaaagcttcctccaaacttacttcttcctttatattccatctgatttaatagcatgatcagtctcccaaactggaaacctgggttatttgcctccagtggttagcaattcctgcccattgcccccctaatgcttatcaaacttgacctgaatgcatcatttccatgtcactcacctggtccaggccctttaccttcaaacaaaagaatgtggcagcctctggactggcttcccctcctccttccccagccccatcaccagtccctcccttgccagggaaccactcttggttaacctttgactgcagcctaaatccaaatcctcacaatctgccatcaattcagtttggactttcagtgtcaccccgtgatccgccactgcccctggcccctggcccctaccctatcccacctctgtgcctttgaatattcaggggtgtcctcttccttttgagaatgtctctgcatccttcgggttgcttctctgtgctttttcaattcctcatgcttacctcaatttgtgtccttatcacatatctgaactgtttgtttacctttctgtctccctcaataaaaacagtaaattccttgagagtagagactgtatctgatccagctctgtatctccgaagccaagtgcagtatctggccctgtgctcaataaattattgaataataagagagagatttttttccatccgtggttggatgggtctttcaagtgtctgtctctttcctagaaatatcttggtaagccctgggtctcctttttctttctaaccagcaattttaaagttttgagaactccctctgtatgcttcgttaaatttttgtttgggtttggtttttaaaattttgtttcttgctctgtcatcgtcaacatcattttttccccacgtctcccttctcctatctctctaagctgttttatccattaaggtcagaaagcacagtgcctatgccatagaaacatttcaagagcctgtgaacatatctgagacctggaaagaaaaaaatatatatatatgagctctaaaatccagggaaggcaagaaaactgtaaaatcaaatgtattaaatgtttaattaaatatctacaaaaccataacgttgtcatcagcaaactgcaacctaacgtaactggtaaataatcagaaactgtattcaacgtgggactgtaatgtatgtgacatagtgtggaatggaggcttcacaaaaagaggttctagggcctgcacaggtttcaaagcagtctctcctctgtcttccttcttttcttttcctctttctctccctctcttgttaactgtgtcttctctgaatcttgcactgcaactctgagcacgtagagcaagttctggagggagccaccacagaaaagaaccagacctgccacgtaggcagagcaaactgtcgcatgaaccatcaacgcctcctggaaggccagaattctgacatatacacctgggggttcaggatggaaagctgatctgcccaaatatgcagagtgcactttcagctttcattaatgactgattctcctgggtccagcaatggcaatctgtagagatatctgacctgcacacccagcttccaatgtgtacagcaaattgtcagtgtggacaccctgggctgtggagggcaggtgacttttcttcctgctgctgttttccggctttggggttttgttttggtgtgtgtgggaggtggcaggctggtgttgatgagctccgactccaggagccagtattcatgagta

SEQ ID NO: 147 - DNA, 2940 bp, Homo sapiens
cgccgaacgccagcgccagggggcggggtgggggagggagcgaggccctccgagagccgggttgggctcgcggcgctgtgattggtctgcccggactccgcctccagcgcatgtcattagcatctcattagctgtccgctcgggctccggaggcagccaacgccgccagtctgaggcaggtgcccgacatggcgagtgtagtgctgccgagcggatcccagtgtgcggcggcagcggcggcggcggcgcctcccgggctccggctccggcttctgctgttgctcttctccgccgcggcactgatccccacaggtgatgggcagaatctgtttacgaaagacgtgacagtgatcgagggagaggttgcgaccatcagttgccaagtcaataagagtgacgactctgtgattcagctactgaatcccaacaggcagaccatttatttcagggacttcaggcctttgaaggacagcaggtttcagttgctgaatttttctagcagtgaactcaaagtatcattgacaaacgtctcaatttctgatgaaggaagatacttttgccagctctataccgatcccccacaggaaagttacaccaccatcacagtcctggtcccaccacgtaatctgatgatcgatatccagaaagacactgcggtggaaggtgaggagattgaagtcaactgcactgctatggccagcaagccagccacgactatcaggtggttcaaagggaacacagagctaaaaggcaaatcggaggtggaagagtggtcagacatgtacactgtgaccagtcagctgatgctgaaggtgcacaaggaggacgatggggtcccagtgatctgccaggtggagcaccctgcggtcactggaaacctgcagacccagcggtatctagaagtacagtataagcctcaagtgcacattcagatgacttatcctctacaaggcttaacccgggaaggggacgcgcttgagttaacatgtgaagccatcgggaagccccagcctgtgatggtaacttgggtgagagtcgatgatgaaatgcctcaacacgccgtactgtctgggcccaacctgttcatcaataacctaaacaaaacagataatggtacataccgctgtgaagcttcaaacatagtggggaaagctcactcggattatatgctgtatgtatacgacacaacggcgacgacagaaccagcagttcacgattcccgagcaggtgaagaaggctcgatcagggcagtggatcatgccgtgatcggtggcgtcgtggcggtggtggtgttcgccatgctgtgcttgctcatcattctggggcgctattttgccagacataaaggtacatacttcactcatgaagccaaaggagccgatgacgcagcagacgcagacacagctataatcaatgcagaaggaggacagaacaactccgaagaaaagaaagagtacttcatctagatcagcctttttgtttcaatgaggtgtccaactggccctatttagatgataaagagacagtgatattggaacttgcgagaaattcgtgtgtttttttatgaatgggtggaaaggtgtgagactgggaaggcttgggatttgctgtgtaaaaaaaaaaaaaatgttctttggaaagtacactctgctgtttgacacctcttttttcgtttgtttgtttgtttaatttttatttcttcctaccaagtcaaacttggatacttggatttagtttcagtagattgcagaaaattctgtgccttgttttttgtttgtttgttgcgttcctttcttttccccctttgtgcacatttatttcctccctctaccccaatttcggattttttccaaaatctcccattttggaatttgcctgctgggattccttagactcttttccttcccttttctgttctagttttttacttttgtttatttttatggtaactgctttctgttccaaattcagtttcataaaaggagaaccagcacagcttagatttcatagttcagaatttagtgtatccataatgcattcttctctgttgtcgtaaagatttgggtgaacaaacaatgaaaactctttgctgctgcccatgtttcaaatacttagagcagtgaagactagaaaattagactgtgattcagaaaatgttctgtttgctgtggaactacattactgtacagggttatctgcaagtgaggtgtgtcacaatgagattgaatttcactgtctttaattctgtatctgtagacggctcagtatagataccctacgctgtccagaaaggtttggggcagaaaggactcctcctttttccatgccctaaacagacctgacaggtgaggtctgttccttttatataagtggacaaattttgagttgccacaggaggggaagtagggaggggggaaatacagttctgctctggttgtttctgttccaaatgattccatccacctttcccaatcggccttacttctcactaatttgtaggaaaaagcaagttcgtctgttgtgcgaatgactgaatgggacagagttgattttttttttttttcctttgtgcttagttaggaaggcagtaggatgtggcctgcatgtactgtatattacagatatttgtcatgctgggatttccaactcgaatctgtgtgaaactttcattccttcagatttggcttgacaaaggcaggaggtacaaaagaagggctggtattgttctcacactggtctgctgtcgctctcagttctcgataggtcagagcagaggtggaaaaacagcatgtacggattttcagttacttaatcaaaactcaaatgtgagtgtttttatctttttacctttcatacactagccttggcctctttcctcagccatagtgcatagctactaaaatcagtgaccttgaacatatcttagatggggagcctcgg

SEQ ID NO: 148 - protein, 421 aa, Homo sapiens
MASVVLPSGSQCAAAAAAAAPPGLRLRLLLLLFSAAALIPTGDGQNLFTKDVTVIEGEVATISCQVNKSDDSVIQLLNPNRQTIYFRDFRPLKDSRFQLLNFSSSELKVSLTNVSISDEGRYFCQLYTDPPQESYTTITVLVPPRNLMIDIQKDTAVEGEEIEVNCTAMASKPATTIRWFKGNTELKGKSEVEEWSDMYTVTSQLMLKVHKEDDGVPVICQVEHPAVTGNLQTQRYLEVQYKPQVHIQMTYPLQGLTREGDALELTCEAIGKPQPVMVTWVRVDDEMPQHAVLSGPNLFINNLNKTDNGYCENIVGKAHSDYMLYVYDTTATTEPAVHDSRAGEEGSIRAVDHAVIGGVVAVVVFAMLCLLIILGRYFARHKGTYFTHEAKGADDAADADTAIINAEGGQNNSEEKKEYFI

SEQ ID NO: 149 - DNA, 567 bp, Homo sapiens
atggcgagtgtagtgctgccgagcggatcccagtgtgcggcggcagcggcggcggcggcgcctcccgggctccggctccggcttctgctgttgctcttctccgccgcggcactgatccccacagcgtcctctgccacgagtggggacacgggatttcccggctgcccgttctttcggcggcccgagggtggcggagggggcgtcgcggcctctgcggccaggcgggcaccctgcgggcctccgcgcgctccctgcgtgaagagcagtcttgggaatttgcccaggggcggctctgcacgcccggtgccttccctgaagacaccgagcactcggctggagcccgatgtgtggctgcccgtgtgccgggcgcgttggcgcgaagacaatgctagctacctgttgaggttgatgttgttggaggatatattggttgaagggaaagagatgtcacttttctatgacatgtgtcaagaagtggttgatagtgaatgtcagattgaactgtgccactatgccagttgtaggatgttcagcatgaaaggctccacttctcagagggaacttatt

SEQ ID NO: 150 - protein, 189 aa, Homo sapiens
MASVVLPSGSQCAAAAAAAAPPGLRLRLLLLLFSAAALIPTASSATSGDTGFPGCPFFRRPEGGGGGVAASAARRAPCGPPRAPCVKSSLGNLPRGGSARPVPSLKTPSTRLEPDVWLPVCRARWREDNASYLLRLMLLEDILVEGKEMSLFYDMCQEVVDSECQIELCHYASCRMFSMKGSTSQRELI

SEQ ID NO: 151 - DNA, 42063 bp, Mus musculus
  misc_feature (1)...(42063): n = A,T,C or G
tgtctcaccaaacatcctttgatgtgtgttctgtaattcaggactcaaactgtgccaggaaatgtgtccctttcctgtgtcctaaaggtataaagacaagagcagttaaaaatactacttgcaccagcagtacaaacacaactgaactctaataccaaggagaacccagctgctgctatctgtctgctctgggtctgaggtgctacctgcagcatcacacaggtggccaagttgacaaagtgggtttcatgtgcttcaaatctgttaggggggaaaatggctatccctataatagttcttggactcatttggagctgatgtggaaggcagaagcccagaagtttgtcccaactttggctttggtagacattccattcacaccatctctagtcatggccttgttgcccctgcttgtctcctcttgggacagaaggtttcctgtgaaagtatctataatccttttcacctcaaggagccacatggaactggtctgtgctatttctcctcctgtagtttagttacttggtgattctatgtggccctttgaactaccctcctgatcttggtccccagcacgtcttggtctgtatgacctttatgttagtaataatcttaaggagaggtactcagaagaagacattattccagatatgccctcagtccattgtaatttttgaagtttctgcatttccttcatgatcctgagttgatgttgagaagtattgtgatagaagcaaaggccaagggccagtggtagtccgatggagctgatgctgccctcctgtgcactccctagagcttgcctcctctcttggttctcttactctgctcaaggctcccgagctcatgcatccctttctgctgcagaacctttgtctttgccctttctggaacaactcttggtacccgttacacagcttcccagaattgagtgaacagtttcccttgtttgtcaggtctttcctccatgggcttggcacattggctttgcttcctgtggtcatattttaaacagtccatgttgagcctgataagtgcccccaccgagcccggggctttccgtgggctgagggctccttccttgccattgtgcttttcactctttcaacaaacagtgagcctctctgtgtcatgtaaacatggtggcctacttgctccagaagaactgtgctattggtaaggcaggcagaccttgcccactaaaccctgatgaaagctgagccagacaaggccaaggctgagtgggtgactcagggggaaggaatcacttagattagtagtatgtcccttaagagaagctgcctgggggaagaggtgttggagctagaatggaaggttaaggaagcaagtgtatgtgctgtgtgcctagctgtggagaggggatgtctgtgtggacctgctggtgtggaaagtaagttgggcaccacaggaagtcagaattttaactggggaagcagctttccatcttatataggtcattctagcttctggttggtgaatagattggcaatagacaatggagaagagtggaaaggttgaggcagtgggccactttggttgacagaggtctggcctggcagtaaaggggagcttgggggatagttgctatagttaaaacagactccagtctttagggagagggtactcctagcattgccattaaacagatggagacaacaaggttcagagggggaaatcctgtcaacaatttcatggttaggaagtgggcagctagaaactgactctggtgtagtttttttctgcagctgtggcctttgagatgggaggagtaggtgatgagggccgtcagcaggctaaagagctcgggttttctcctgaggggttctcagaagaacacactattccagagatgccccagcagcctattctttacctactctgcaaaaatgtttaggtttccacatttccagtcttgggttgatgttgaagagtatttgccgtagcaatgaagactcagaactctctaggcttctgggtgccaagccttttgtgcctcagtaatctgcctggagccctgccttgtggagtgtctatgcaggacagtggggcggggtgggggtggggtaccagatttgtatgtgagataatctgacagctgtgtggaggctggatttgtgggaagtgagactgaggatgggtaaccagtgagaaggttcgttatctccagatgggacactaggacctgcaaccaaagctgcagcaggaggggagggatgtgaggtgtgaagggcagaccagatctgggggtggggaaaaggggaggcaggatgtgagtaggtagatgttgatgctgccaagagtaaggggtacatttggaataatgcaagaccagtttggacatagtgagcttgaggtactccaagacagccaggcagtggtccttgggctgagatagtcatcaggaaatttcaagttcaaggctatgttggcatcttatgtggaaatcatctctccaggagaacgtggaagaaaatagatatccacaaaggagttaggctttatgggaaatggtgactgggagatgtgagaaggagatctacttctgggaaggagaagggggtcaccaaagtggggtgaaggaggtggacagggcatgcatgatcagtggcatcagccgccaggcaagcctggtcacagaatgccaccttgcacttagggatgtaggcctgggtacactggagcttgagctgggttgcaagaactggccctgaataagccatgggcagtggaggtcaggaggccagggatcctagtgagggagcagaggtggggcccagcgagcatttgcagttcaacagaggtgaagttggaattgatgacaagaacttttctaggaagctaaggggaaaaaaaggaagagagaccctaaaatagaatatgcaaatatgcagagatgggtgagctttctgaacagatctttctcctgatataactcaaatttggctgggctgacacggactgggctggcacagcttgctgggcacatgggcctgggttctgctcctcgcctcagccccatctggcctgggccccagaccaagctctcagagccctaccctgaggtggcttctcatttcctctgccacaggccttggcagtgatggtttggtgagaatgttgggggaatttattgacatgcctctgtttgcctcccctgacacccacggttcggccttctctggctctgggccataatcatgtcagcttggttacactgttcctgtgggcttggccatgtcttggtcccatacatttattctgcagttgctggtaacagaattcatccttccccaggccagaaatgccttttcacaacgacccaggcttctgcctcagcaaggctaggtcccagcagtgctgtgcagtaatgctcatttatcgggcattccatgctgggattgagttgagacccatggtgccatctcagtgcattctcagaacaaccttgaaaagcaggtttttattatcctgtgcccacgagtgctgcccattaggagatgtaactatgttgggaaaccagcctttccagggcttgggtgagacagtgtatccaatagccatccttactgtcacctaggctctgtccccagcccacagtctggaagctacctgggctgaagagtgtattaaaccctcaccctgagagtggcagtttaggcatgggaggggaacaagcttctacgtcagaccaactgaaggttagatcacttccacacatggcttgtattctgggagcctcagttgtatcctgtttgacattttattctaagtctatagatactgacagtgtgtgtattggagacacatggcactccagagctgggttggggacgattcaaggagttggaatcctaccacataaggtagcacaaggggaatccaaggtggaggactagaataagcctttcattgagaaaccaaaaatccaattgctaaggggctggagagatggctcagtggttcagagcactgactgctcttcagaggtcctgagttcaattcccagcaaccacatggtggctcacaaccatttgtaataggatccggtgtcctcctctgctgtgtctgaagataaatacagtgtactcacacacgttaaatgaatgaatgaatgaatgaatgaataaataaacaaatgtattctggcttcaaaaaagaggccatctaaaacaaatcccctcaaatttggagttgaagaggttgttcagtggttacttattaagtattcaattcacaactacctgtaacagcagctccagggaatctgacacctctggcctctgaaggcatctgtgtacacacagacacacacagacacacacagacacacacacacacacacagaacacacacacacacacacacacacacacacaagatttcaaagaatttgacctaaatttatgaaggggctgtattctataaagtgaatagacagaattgtgtagctttagaccactatttggcagtcttccagaggaagaaacctttgtgcagagctaagaagatgggcagaggtcctccatgatggagtacattgtcatcagaggcatgtacttagaggctgtctgaggccacgagggctgtgttaagaggttcctaagttggactgtatgcatgccttttgaataatgcttttggtcccaagaagtgcaatttgtgagttcttacatccatgagaaaaggtgagtgattttttggagcactggcctatatgtggtcttctcattgctagggtcctagcaagcccaaggatcatatcagctgggagggtccgggcctaccctatgtaaagcatagtaagagtgcatgtcgtccagggtccaagcaaaaaaaaaaaaaatgccgaaggtaccatgctttactccaggccagaaaggagctggttaggtaaacaactgcgtcagctcttctttctcacttgtgaacaaagaaaccatggtggcttacacctatgatctcaatactcaagaggctgaagcaggaggattggtgtaagtttgagaccaacctggactacaagagagtaagaccctgtcaagaagaaaaagaagaggaggaaggggaggagaaggaggaagtggaagaggaagagaaggataaggaaaagaaggaagaaggagaagaaggataaggaaaaggaggagggagaggaagaggagcagaagggagaaggagggaggaggaggaggaaagaaaggaaggaagaaggaaaggaaagaaaaaaagaatcagagttggcctgggacagggcactgccaaataacttagctgccaagctgagataggaactttccagatccatctagtcaggagattttgttacaactgatgggtcacatgtgatttcatgtgattgtatctgatccaggccctggagagcaagaatggaagctcagagatgggtctgtggcctgggaatgggctggagggaggagatttctctgcaaaggtttgggagtttctgtcctgtccctaagacttgcagacaccaggtggcgctcctaccacaagcccagtgccatctaagagtgctaaactgtctcacccagtcatacttgagctgaccgccttaacggaaggtgaaaaagtctagctcttctctgcctgtcctcactaaatattcctctctggattttcacattttgatctcattgagtttttaacaatttagggtagagatcaaatgaaaatgtatgtttgcgacagatacaggtataggctggcactgggcagtgcagaccagaggggctaagtaatgtgtgtttttcaagtctttcaatcagagttggtagctggtagactctgatccggcttagggagagaaagcaggagcttgagaacaagctggtgagggtttggagatgtgtggtgtggtgagatgtggtactctgtagagcctaaagagctctgcactcactcctacccaggcacacctaggcatgtggccagcaacaatggtaactaaagctactgtgccatgcttgtgagacggacaggcatggtgtgcagagtggtccagatgtggcctaaaaactgttttgtttcttaaaactttatttatttatttatgtatttatttatgtatgtatttatttattattctgtgtatatgggtgttttacctgttcacatgtctctgcaccatatgtatacactgccatcagcccctggaactggagttatagccagttgaatgctagcatgtgagtactgggaatagaatgtgggtcctctggaagagcaaccagtgctcttaaccattaagctatctctctagctcctaacacctggcatcatgcatccgtgttaacttttttggatcatttggtgatgcttttatttgatgatgatctctttaaaccggagagtttgagcaaagacttaactttctttcttttttttttttttttaaagattttttatttattcattatatgtaagtacactgtagctatcttcagacactccagaagagggcgtcagatcttgttacggatggttgtgagccaccatgtggttgctgggatttgaactctggaccttcacaagagcagtcgggtgctcttacccactgagccatctcaccagcccaagacttaactttcaacttcacttgaaaagccagacggtctatctgctgccttttctgtggcctccatggtcctgagctgagtagcagctgtcctgtaaacagcattccacccatgacctgcttggtctgtgtgcctctgacaattaggggacatgaagatgagtaaatcgttcctgttgttagaggcaggcctgggtggagacttaatggcagggatggaatcctacatgaggaggcgacacaaacgactagagctattaataaccctgagaagttagattcttagattattatatctatgaaaattagtatgatggtcaacctgtgtgtatgttgtatctcctcaccttgggcctcttgttggggtaggtcatgcctgcaaggtcaggctgtggaatcaagactgaggaaagcttgggaaaggagaaacggactgagtttggtcccagagggtaagaggctctgttggaatattgtgatggaccttaggacctccgctggttctgggtcacgaagctccaatctgtatgtgtccagatcctttgatttctcaagggtacccgttggatttggctgcaccttctctgccccacagggtgcaggtctgcatcctttctagtagtcttgtctcccactcctccaattctggggccatgtgaggagaagcagagctgtgtctcccctgcagacttgtcatcacttgcatctgatgctgcttctggtgaggccatttcccatcactggtcatgagtggcagggtatgccttggttcaggctcaagggccagctttggattctaacaaggcaggcaggcaggcctgtcactacctatactgtttcgatttccctgtgttacctgagtcaggaacccccaaactattgctggtacctgttcccttctgtggcttttccttctatagaatcaaggagcaggctgccatctggcctggcccgttgtcccagggtctgtcttggagaaaagacggccttcagcacttctcactctagcatgcagccttgggaaaaaaaaaaaaaaaaaaaaacaaacgccttggcttctacccctagtttccatctgttccctattgcttaggaggctgagtctggcccctggcctgcccttctgctcagcacgtggtaacctagccctgtctgggtccttctgaggattgtttggacccagactgcagtcaagtaccagcggcagcacgcaaaggcacattacactgatggaagcaaaggtgttggccctagagagaccacctaagttaaagtcccagctctgccactgtctctgtccacccgagtgagtttaggtagattgtatcacctttctatgccttaattcccctgcttatagagagaggaactatagcacctaactcctaggatcatgaagtcggcattaaaaatgaggcagtggaatgtttatagcatgtaatagtaaccacactattggcaattgttattaaagtcagaaaagttggctttctgtctccattcattcatttccaattgatctcagacggacccctgttgtcctggatgcctcagagttgtccctaagttggagctatgtttccttatcagaggaaaaaaatgtaggtctgagaggaatgatgtaggcggaagtgggttgcattttatgagttactgtgcacatgggtaatgttttcatttcagatgcacttgaatgcttggttcttaaaggcagggatgggtggtttcttaacttgccccaatcatttatagaaatgaagatactggagggcataactgcccagaatatgagtcactgggctagaaagcaagtatcattcttagaagctactttggcctggtcagtttgccaactttagggccacaggattcagtgcaggcctgggaaggagttcttgggctgtcaataggcttttctttctggggttgtgatcttaggcatcatgaagctagtgactccgtgcacagccctgtagtgtctctagacccctccccacagagagatctggaggaattcaccttagtggctagggtactttggggcttttaggaatggagaaaacaactagaagcagactgtacaattggcagagctaagattcgctgtatcaaaacctccctgcccgtggagcagtgaagaggctggctctgaggtcagggcatcctgcccagggtctgcctgtgtctacagcatgctcagtatgtctgggtctgtgggttttgaaggtcaagtctttgtttacttctgttccctcttccttgccctgtctcttcttggtgcagtacatcttagactacatatacagtaagcaatagattgggacaagctgacctggatggatttcccagtcatagcttctttgggtacaagcagaggtagggaatctgtccatctctggcccaaggaacatgggagacccttttacgaagagcagacaaagtggctctgaaaacataagccaatgacagagtttcctgggttgttcaggtgactgcagaggggcctggaccctctgatggaactaccaccgcgtcaccaggttgcccttggtatgtagctgagccttaggcagagaaagattcccttcgattggtctgaccttccctctctgattatgagtcttgtgcccctcacttttttcttggggaaggggccttcctaattatatccccctcagtgcacatggaaatgagtttggattttctgagcatacaccagctggctggggggaggcagcccagaaggctgctggctggggaagggaggagaaaggagagggagaggagggagccaggccaagatgaaaaattcccagtgttctctcaggcagagcaatcgtggggcgttgtgggcaccccacacatcttagacctcccctctctcctccacagaggaaagcatcctgctccggctgataggatcagcagagagctgcgtcccactcccgcaagcccattctatgagaatggttctctgactacaaaccacttagctgacagcaaggggggttgtccggtgttagactcatccatgcgctgagagatccttacggatttcctaggcctttctttccactggggcgagggaagtggaactgaagcccagaggagggatgggatctgcccctcatgacagatcacaagtctgtcttctttgcagctgggttctcccggtggagttgcccgcgtgcgggtagcgaaggttttcctggcagcggtcaccgcacaagcaaggggccaccggcaaagctagaaaaggctgcgaggggcgggggggaggggcggggtggggtcaggcgcttgactccgcctcctggcgctaggttctgcctgcggccgggcgctgtctcagtctcggctgcttgccgctgtcgctccggggctgcgggatgacgcctcctcctcccggacgtgccgcccccagcgcaccgcgcgcccgcgtcctcagcctgccggctcggttcgggctcccgctgcggctgcggcttctgctggtgttctgggtggccgccgcctccgcccaaggccactcgaggagcggaccccgcatctccgccgtctggaaaggtaggcggcgccgcgcggccggcggggcgcgggatcggacgccttgcggggcgggtgcagagtgtgcggcacccggagagagtgcgtgtgcgcagctctgcgggtctcaggctggccccgaagggagcgtgtgggtccgggtgagtgtttgtgagtgtgcgtactgtcacgccggagcgggctggagcgctgcagcgtgcgagcgagtggctggggcccgggcccagctaagtggcgctccaagtccaacggcagctctgagccggagccgcagcgcccgagcgcggggggaggctgcgggcccctgtctcaccgaggctctttggctttccgccacggggtctactatacagaacccttctttcccctggccagcttcatcaccccgacctcctccttgcaagctgcgagctctgctggcacgcggggctcgggctcggctggtgaagggggcgcggacccattgccgccgccgctgcgctcgggctgcgggaacaaagaccccgccgcctgcccccgcccccgccccggcccggagcgcgggccaggcaagggggtgggcaccctgcggcgaaccgggacaaggtgcggtgcaggggctccgagcacctgggcgctgtctccgtaatgctaggaccagccgctccccccttgcccgcacgtggcagttgtcaccagaaatcggcactagcacggggaggggggacagtgcccattgggtggggcgaggccattgggacccccaagcggcgtatctggggaggagtgtgcatccttaggactgtagtgaatatgagaacctgagggactggagtctttccttcgggcatcgcagttcagaaccacggacggtgggacagaaagctggctaggttggggttggaggctttctgccactagggactgagctccctccctgcattgcacacaaatgcctccccgcccccagacaaactcagctctgtacccaaatttggcatctctgcagcccctcccctagtggtgatgggggactcacaccgggggctgggggtacttgtcctgtctgtccctactgtccctttgatgccttggcagtttgcagggattgcggaagtctgagcattatctggggcaggtattcttagcagagggggggaaacccacataaaatgagtggcccgaactgccgcagcagctgagagaatgtgacttgcccaaggtcactgggcagtgtgggcactcactgtgccggaggggtctctgatctgactctggatctgtcctgggccaggttagggagaggagaaggatttagatggttctccaaaccataaacgtggtactctcgtctccaactccgccatccagccagaggtgtaactggtggaagaggagcagtttatctggacctctgaacatccagttcatggtggatacttgcaccctccacagtcgcaccacttcagcctctttctctgtccctgccagcatgttaacttcctccgtccccttgtgtcttagacacatgcatatgagtatgccagaggagacaaacggttatgtctgagtgttctggaatctccctctgtatcaaacccctttcatttgattgtgcttgtccccccaatccttccttgacctcccgccacatacttaatgcacacccacttgttagcacttaatgcatgtctctccatccctggcacttagtcttcccttaccctcagactatttaaagctgctctcagccctcttacccactttcaggctcccagcccatctctatgtgctgcttccctagcttgcacttcactgagtgaccacactggtaatgcactattgaccccctctggctgggatccaccagacactcaccaatcttgtccaaggacagtctgcagtctccttcacaagtgccaggtgccccactggccagacaggccctgccattcacctgtccccaagcccctagggccaccagctggtgatggtgtgcccggctgacagctgcctcctgtctcctatggggtaacacatggcaatcggatagtagggagcttggatagggccaacccaggcacacacacagagagagagagagagagagagagagagagagagagagagagagagccttccaagcgttgcagtaagcctagggccctgtctaccagtggatgggatatagcaaccttcagggttgactagactatgtgtggatagtggtaaccccacatacatttctgtacaagacatagatttgaagtttagttttgagttgagacagaatagggactgggacaggtatagaaatgtctttattttctttgcttggttcccaccctcacttcaagccttaggaaaagattaaaggagggtctctgagaaggtcccagacttcagttgtttgcaatcagatgagagcctggtgcagaacagcttggaccagggagaaggtgttccatcacagactgctggctatcctgagctgtgcacctgtctttgactcccaaaggttgccagagcaggaaagctctggaggtagtccctacagggcatctctaacgtgtgagtcagtcatcagtgtaaacgtatgactctgacccttcaagcaagggcgggagacatcggatggcaggagagggcgtagtgtggcaagaagttggtacacttgttatgctatgtactgctccccaagagctggagaaggagaagcccatggaggtcggtcctgacccccaagtcagagttatccagcctgaccacagtctctccctgccctgctggttcttccccctctggcccaattaaacaacaggatgttattgttgacttaggagctgctgggtagccattaaggtgccactccccagggtagggggttgttgtcacctcctccaggggatgaggtcacagctggggctctcaaagcatcagcatttccagtggaaatccctgcccccttgggggacttagatgaattcatcaccttcaaggtgaaccccctgcaggactgagggggggcgatccccaagaggaaagggggtttcctaagctgcaagagatgcttggtgacttccccagacgctccctgccaagttctgtgttggccctgtgctgaacattgaagcttcagagagtagataatgggatggagctgcagatctgagttgaatggacacagatccaagttactctggcacctcaggtagaaataggtgagaagagcaagtgggtgagagagagagagagagagacagagagacagagagacagagagacagagagagacagagacagagagagagacagagagagagagagagacagggagagacagagagagactgactctcattcactgctgggccacaatttctctagaatccttttttccttaggatgcagagagcaaagcagaggccacagtggccagtttagatcttggtattaagtgactgaaacctgggtagtcaggggaaatccttgagtcttgtttccttcttctcttcactgtcacaggctgaaagtcaaggatcggttgcagggaatggcctgttggcgtctgacctcaagggcggacacacatttaacaggcgctgcctgggttctacttcgtgctggttccagactgaactcaagggtccagcagagaaactaaatgtgttagtgcccttgcagacaggaagcctgggcagataaacctgcgcgtacactgacaggacctgcaacagagagcagtcatgggtctgaggaagtctgcctggccagtggatgaggtagcaaacatgagatgacacaggcaggaatgggttgcgtgaggaagggacaaaggaagcacctgtctgacagggttgagtcaactttggccagggatccagcaaggtatcccccacctccacctccacccccactatgtagtcccaactggcctagaacttgctatgtagtctagtgtggccttggactcacataaatctacctgtctctgcctccctagtgctgggactaaaggcctgtgcatcaccatacctgacttcagcaagtttcttggagatgatatgcaagccagcctcttgtcactgcatgggcagccttctagagaaagacagtggcaggcaaggctgtcctaggtccctgagggaagtagtggtggggtccagggccactaggacctccccatcagctcctgaccaggggaggattcttcacataggaagcctgccatgcccattctctgcatgtaaggcagaagaaacccccttgtatccaaaccctgtattgcagacagtacaggcacaattcatctgaccaacttccccttccgggaaccttggtcccttttgagagtacataattttctaggttgaatatgatgttttctgcacttgggagaagtaaactgttcacttgtctttgaggagtgctaggccaggtggtctgtgaggctcagcctgcagggggcagtcatgagaacaatgaccctagagttccctgctcgagttgcagctgacagcgtggcctccaccgtcttccagtcttccagatccttcattggacctcagttctgggtggctgtatcttagactcaccgtatttccctgccttttactagcagctctgaaccaaaaggcttctgcttcttaggttcctttttttggccaccccagaaaccttgctcctcttcagggataggagagacaggctcttgatctgccctggctgtgcaagaaggaccagctgccagatgtatgagcatctggctgtcggtgagccaggctgaccagagaagaaggagagagtaaaggaccacagtcctgaatccctagagtctagaggcttctaccttccgtagtcagcccaggtcctacgttactgtcctaccacaggagaaggttctccaagccttatcctccttcaggccttcatcctggcaccactgccccttatgtagattgtactctgacctctccattcctctgggacactctactgcgtgttctgcccagaacacacagccacgcggagcactgcttccccagagcctgatggttaccctctgactcttctccccatccctcccagcacccagtgctccccagggcatcctccctgcaccctacttaccctcctcctcaatcgcctcctcaatcccctcctcctgcctgccgattcgttctcagttccatcgaggaaccttcggagatgaactcagcttacccagcctgacggaactgagctcagggtgtgagaaaagaaatgtcagagagaagctgggccaatcacacaggccccagatggagaaactaaggctcagagacggtagaacagactcaaggtcactggcaaaatggcagaactagtgtcagggctgtgtttttctgccctgagctttccggtagcccaagtctctgccccctcccaatgccctgtctactgtcatgattttctgggtctagggcttctaaagcctgttacttccttgatctgtttaactgagcccagagactttctagccacccaccaagaccctcagatttggacccgctctgtatacctcgtgtctggcctttactgagcagagcttgggtctcagggggcaggctgctctgtgtcatggctcaggctaatctgggtttaaccacaacagcagcctggggattaggctgatcctttggggcctcctgtacccctgcttctaatcaagaccccaggctttgggccagcatcctgggaaccatcagtgtggaggcagcgagcccttgatccctgcctgcacctccattcagctcctgggagagagaaagcaggagaagccctgtgcttgccccaagggagccagctgttagtgatggaaaaggggcccctgggaagtcaggagtgcatagccaagactatgacagaaggttggtgtgggtgatacagtcagggggaggagaaggaaagagcaaaggatataggggacacggtatagctgctgctgtgcctcagcatcccaagtaaggtcatcatgacaagcactgtaccccataggtggctcaggaacctcttctaaaatatctcctcttctgaaacgtggtaggaggctaacccctcctaaccgctggaccttcctatcttgcccagccctggcaatggacagtgggccctccttcacagcacctcacatatctagtgaactcccaccagagccggtgtgatctgagagaagagaacatgtcagatagtggacggaacacagtcagagagtgcagggcagagtaatgagggctagggcagtctggaacacttctggagccaggggatttgggctagatgttcaaggacaagtgagatccacatgcagcagagaaaggacggggctgtgagcacatggggaataggcatcatggggatgctcagagacaggtgagccctgactgccctgctttggggactggtccttgctgggatggtcccagcctgggagctgtggtgggatcctgagcttagagccagggtggagatgcatgctaccgtaagtgctgactggctgggagcctgggtgtacagtagacaaaggctggtgtgcatactcagcccaacagcttcctagtaaggacagcgatcctggatttatcttcccagtttgtcatactggctagcatttagggcgagggtgatatactgcacccctgattcctgtcccatctacaggcatactcatgctcactcagatacacttgtcaaggtgtcacaagtagaggtcaggcatttgttggccagtagcctttgtctggactctagcctccctcgtcttcattctcctcagcgctatagaaggggctgccctggaagtcgctgagagtccatccctggagtacagtaggatatgttcaggtcccagggttagtcagtctgtgtcaggctctgcttatatggagctatgtgattctggataagttgcttagcttctctgtgcctcgcacaccttatctgtgaagcagagctaagagaccagacatcatatgagcttagtgatttgctgagttaatagctctaaaaaccacttgggatagcacctggcaaatcctgctgagggctagcctcaccactgccatccttgtccctctttctgcttttcctccccctctcccctccccttctctcctccctcctccccctccctcctcctgcggcatctctagtttctcatggaatgcagttctgcagttctggcaccccagaccctgctttaacgctatgctggctgcctgccctcacactgtgtcccctgctggtccaggccaaagctgaggctgggaaccttctgtctcaccacagtcatccacctgtctccctccctactgggctgaggtaggcatcctctaccttcttgtcacccctgccctggctctgagcccaagagcagactctgtactgtttgcccgattactgctttgaagtagccattagctgacctttagggctttgggaacctgcttggccaaagaacagcttggagctagatagggtgtggcattggctctgggctccctgcctttcctgggattgagctcagaacctcctcccgactccaagggctccgtgaccaccttccatctccacttgaaccctttgagccttgctcacttcagctcttccaaaagtacttctcatcaaactttgtcccagcttctttgtctagcagcccgaatcctctggtcacggtgatgcaagtggtcccagcccttgggtggtttggaaaggctttagttttcctctctctaaaatggggatgcagatgtttgtcttgccttctttgcagggtggtggggatttgttgggctggccagaggaggcagacgaggatgtcgctttcacagtcgctttgcttccagaaagctgtgctaacatctttagcatgtacactcaagtcttcccctaatgacccatgaacttaaaccttgactgctttgtgttcgttcctggaatcatgatgggtcataaaacccaggccatgacaaaccagcaacccccatctccaccagccacagaagggggaactgaactcagggaggccctttcccagctcacaaacaacaaccagatgcctggatgccaaagagagtgggtggtttcttggagccagggctcaaacgaacacctgagatatcttctcctcccacccatgaccttggcagtgtaggcttgctgataatgagggtaaatgtctcattactccatgagggacactgccacattaggcccttgctaccggtgctggcacggcacttacctggcagctgtcagaacccagccctgcacaggtgtcaccagtaccctgacagtagccgtaatctgctcataacaccaggtcagtgccatctggaaatggccatatcagaggcagaaccaaggaaacatctgtccctgcatgtctgccaccactgggaggaattctcctcccatcctgctttgcatccgtcatgcctttgggttactaaaggcccttgggagatcagggccctaccttgccagtggatgggtgattcccttccgttagcaagttagcgattctgtgcttggtgagtaagggtggagagagtaaggagagagtaaggtggagaagggcaggtttcagcagctttctcacaacagtttctcaaaggagacccaagtgagggtggctttagagagatgcagtggcaaagtgggtccccaagtctgtgaacctcccttgggtgtgtgtttgcctttaggtcaatgccatagcctcgatgaccaccacgtctcccagcttggtggctgtctggattcctgccttgatgtgtattatgtgagacgccaaagggtggagggactgcaggttagctcccaagtgccacgcggctcttcattcttttctccgagggtgagggtgtgagtgggcacaagtgtgggaggaggtccctgccagatatggctgtgtccccagtctgtggttggccaggctcctgctccttggtgacttaattcaggcatttcctcctgggatgcccacattcttgccattctctgcccactttccaagggctcttggaggttagcattcaaagctgacgggttcagtgggtcaaggaccagcccttgttgttccctttgtaggcagtaaccctcactctaccctttccagcctgccctcctctttcacaagcatccgggctatggggaatgacgggagcagatggtacagcatccagagtgaacgagaggaggatggatccttcattaggcaagcctgctttgagaaaacccaaagaaaacctccctacttcctacagtcagcctagtgttgggatggtcatgggaggatggctcccaaatggaatcaagcctgcttgtttttctcttttgcaatagaatcaaggccctatggacaccctgtccggagtgctgtgtctgcatagggccacttcctgtagtcttcccaacacttacatctgactagaactcgtctaacccttatgaaccctatactgtgaggaggctcagggaccatggaccagctagctatgggactacctggggactctgctcaggagagccatgattggctctgaatcacatgggttggggatggccgttcttgtgcctagcctgccttgaggccatgtcctctttgtgtgcccctagccccctcccctgcctgaacccctggttattctgggagcttttagctaccacttagtcagccactaatgcgtcaggccggggagtggggagggggggagacaccgtgccagacggtgctccttttagacacacaggatagaaaggaagcagggggagccgggagccgggaggtgagggactgccggaggaagggagatattcccactcctggccttgctccttggtagcaggcagtaggaagagactgatggtcaatatgtccttgggctatctgtgctttctttgccccaccactaagacctagccttctggattcttctttcattaattctctgtcaggtagcagtcctctactaccatacactccgctccgttcatgcagttgcctctgcttgcacaccccttccccatttctggccagtctagcttttatctgccttctcatctctttggcttcacaagacagcaaagagaatgtgcttaggggagtaaacacttaggctagaccttttagacatagactccagtttgctcagcccctgtctaggcagggccgtgcatacatcccttcctctggcccaactttctctgaggtgatcctggccaaaagggcttgctgctgccttcacttccaggcagccctcctgccctgcgcccccagcgccgtcctctccccccatcctgctgacctgaacaaagctttctttcatgtattcatggaacggctgctctgacacttcctgggcacaatcaggccctttgagggcctcgggcagtgccgggagcctgggctggggccggggtggagaatgggccaaggtcttgtcctggggctgagctggtgccatctccttcctccccctagttcatgacacatcaccaggcccagatctgggaggggcagaaacctgaggggtcatcggagggttggtcctaagcttctgtttgttctgcaaaatggggccagcagttcatgtcttccctcgctcggaccttgcctaggcttgaggggaaacagaggcttgcaaatcagcagagtgctgccctggctgtatctattacccgctgccgacaccctcccctgcccttcaaagcttctaagggtcttctgggagcagcccaggctccctcctaggacaatctgtttagtgaccttcctgtggtgtgggtgcctcttatctacacttctgaggagagccaagtatcctcctcaggcttagtgcttgtctcctccacactcggcttcacttccaggactgctctttgacagccctgctacctccagacaaaggctccctccatggtcccctctggtgccattttccccttgagttaacttgtacattagccttgcctgtcccttcctgtcccttcttgcacatctttttcccattcctggctgatctagcttttatctgctctgaatcaacaagacagcaaagagaaagtggttcgggaagtgaacgcttagtgaacacttaaagataaactccagtttgcccagtctccgaataggcagagccttgaatgcatccttcaaaaaccaatgggaatggggaacgggaatggggaaggggtgggtaagacttctttggggtccagggtgttgaacttgatgtaggtgcttgggagctaaggagactggtggaagtggccagcccggcctgggagtgcttctttttcttagctttgtggctgtaggtctcagtagcccagcatccccaggcacagatacgaacctttcctcctgcctcccagtctggatgttacagaagtgtgagggaagttgagctgcctgggacctgggcagccatgagtcaggaagaccaagtgtctgctgcctgctgagcccagctttacagttttatcccagcccgaaaagagccggaggacagtgcccatgctctgccaccactgagcacttctgtccagaaagcagcacagagctgggctctcagcccctgccctgcacatctggggctaatctaacgagaggcagctttgggggtttgggtatgagaggtagggttcctgcccctccgttcccaccctcattgctggatcaggctgttggtggtgtgccccaggagagccaggtcagtcagaaggcagcagactcagcactttagtctgtacccagctaggctcacatctccaggaatgttcttgagaactgatactgtccggatgaaacattctgccctgcttgctgatgcgaccttgggccaggcttgtcccccagagggccttggtttccttctcttcacagcgagccaggccacagcagagatgcagaatctgaattattctcactgtgtctgggatcacttggctgtggagaagtgtgtgttccggccgttctttgcctctgatggatgcaagaccattaggaatggcttaagtagcagcaagaaggatttagggcagcccttgaggaactggcaggtttttttttttttgttttttgtttttttgcctgaactgagtcgtgtcctgcttgggtgtcactgccaaactggctgtcccaaagtttgctgcagctaaaaaaaaaaaaaaaaaccaaaacaaaacaaaacaaaaaaaacagtggctagaccgggttccggggtgaggcccaggctaatcagaggtgaggggacagtggctatggttgattgctgagggcatggccataagccatctcatccctgtaatttagtcctgcaaccaggacaacctcaacaatgtcactagagatgagacagcttctccctggaggcgatggctgcagacagtttctttttttgggtaaaactgccctggtcagcccttctgctgaaaggcgtaggctgtactttttgaaggtcccctgtcccagagttgctgggacagagagctgagtcccacaaggagctggcatctgggcaggtgaaatcaggttagagattagttttgaagacagaagcagagggactgatttagggcccactccccacctgctttcctgcgttttggggctgtttctcccttgacctgtcttcccaactgtataatgggaaggagtagatgttgagatttctctcagttctgaaatggtgcccattaagagccctgggtaagccaggaggggttggagacaacttctcagctgtgaataaaatggcagcccagggatccgaaccctaaccggggagcttcaaagccttgctgtttgcttctggagagactgagatggagggaaatggagattccctcccaggacagagttgatggccttcccatacctgcacagcccctcaggagtgtgtgtgtgtttgggaatggggactgctttccctaagatccctaaagtgcccctcactctgagacagcacacattctggggaaggaacagtggctttgggtgagggtgggtgatcgctggagtccaccagggcattccttacttctcaggtccacctacaccaggccttgtctctgaacctccagtgccctgagcttggagcattaattagccagcagggcttagcatgcctgtgggaactccagggtcctcttgctcagggtgtttttctctttcatgctgcacagggcaggaccatgtggactttagccagcctgagccacacaccgtgcttttccatgagccgggcagcttctctgtctgggtgggtggacgtggcaaggtctaccacttcaacttccccgagggcaagaatgcctctgtgcgcacggtgagcttgggcccctgccgtcccctcttccttcctcttccttgacctctggtcctactgacggcccttacggagaaggaaggagctggcacatctttctgtatgtggccttctacctccataacctcacacatgggtcctggggcggcttctacaggtagtctactttggagtagggagtcaggctatgaggagagaaactgggagctaacacgcatggccggtcagtgctgatgggggatgccaggttaggaagctggattccagaacccataacctgccttttgcggttgctcagctctgctcctggtatcagacaaagagcttctgtgaccttgggaaatgtacttacactctccaagtctcaattacatctgtggaagatggaaaagataatagtctcatccggagcttgccccgaggctgtgtgggcagcatttcaggggcatctcacccctggaagggggattaatgattctcccctcttccaggtgaacatcggctccacaaaggggtcctgtcaggacaaacaggtgagtcaggggagggaccatagggaagagtgggccccttggggaaaaaggagaaaatcctgagcgtcaaggaagggagggaacatgagtttgctagacttgtggctagtctttgggcccctagacagagggggagagataggctcctgacgtaggccttgttcattgggggatagagtcagcagccctgggtgcctgctatctatctatgctcagcccttttggatgtattctttcccaagatgttggatcttagtgtcttctaggcctgccagggactcccacccacctaattctctccttccccacacaggactgtgggaattacatcactcttctagaaaggcggggtaatgggctgctggtctgtggcaccaatgcccggaagcccagctgctggaacttggtaagaacccttcccatgtgcctgagtagtccccatttcctgggtgggtgtcagcccctcatggccagacagaggtgagagattctgaagccggctttaccctaagcagagtctctgggagaataggctcctggctgggcaactgaccctcacagggtgcagtagccggtggtcatgtggccatctgcacctctgatctcctccaggtgaatgacagtgtgatgatgtcacttggtgagatgaaaggctatgcccccttcagcccggatgagaactccctggttctgtttgaaggtagaacagcattgggcaggggccccgggagggtgctgcagcaccaggctcggggtaggagggtcagctccttgttcaggggcccgagcctgggggaaggacttagagaagatgctgctctaacccacatgtcctcctgccaccccaggagatgaagtgtactctaccatccggaagcaggaatacaacgggaagatccctcggtttcgacgcattcggggcgagagtgaactgtacacaagtgatacagtcatgcagagtgagtcagatcctgattgcgctgagggcggacccaggggtgtgagtgcccagggtggcagatagtctccttgatgtgtgccaggaggacttcctaagaagcacaaatctgaacagtcagctctgaggagtctgagttgtgagagaggaggaatcgaggtgtggaggccagatgggtctgaataactctgggagcaaacacagaagaagctaagacctagcatgaggcccagagagccaaaagttcagctttctcatgaacccatgtggggcaatggccccatcttcctcattaaggctctgttgattaggcagaagtgacccaggcaccccagggactttccttcagtccctaagcatgaagtcattgctcctgggcccatgacatctttgtagaggaggacataacaggtgtggggtattgctttagagctgagggccccatgaggccttaagtgctgttctgagtgcaaggttgaatggctgccacacaggtttctaacctcataccctatcacccatgttcctggcagacccacagttcatcaaggccaccattgtgcaccaagaccaagcctatgatgataagatctactacttcttccgagaagacaaccctgacaagaaccccgaggctcctctcaatgtgtcccgagtagcccagttgtgcagggtgaggcagctctgtgaggggtggctgggtgaatgatagtgtgtctgtatatatacaataggagtgagtgtgtgtgtgtgagtgcacacgtgcatgaaactgtggtaatgtgtgtgcacaggctatcatgtgcctgtgagtaaatgtggtttagctttgtatgcatattggatgaacaaacatgtgagtatgtagtacacgtgtgtttacctgtgctgtgtttgtgcgaatttgctgtattgtgtgtttgtgtacaagtgtgcataagtgaaggtagcagatgtgtgtctgatcctgtctgctatggaggacccagaatgttcatctgcagggccccagtgtgggtcccgggcataccaagctggagctcagctgaaagctcgcctaggtctccacagatttcagccccttgaaacctgccctgctctgggtactctgggtacctctggtgtgtcaagcaggtgctgagggcattcttctgccttcttgtccttccagggggaccagggtggtgagagttcgttgtctgtctccaagtggaacaccttcctgaaagccatgttggtctgcagcgatgcagccaccaacaggaacttcaatcggctgcaagatgtcttcctgctccctgaccccagtggccagtggagagataccagggtctatggcgttttctccaacccctggtaaggagtagttcacgacactagcaaccaggtgctaggcttgagttcttactgggtgtgcagtagaggtgtctggcagtgtgatgtgtatactgttgtgttttcgcttctgtatacatggtgtgtggccatgggtcacgtgcacattcctgcctatgtgttctgccatatgtgtgcccaaaactgatactaggcctgggaaaggctggggtgctgggtgtgatcgcagctgctcaaacactgcctgataattcacaccttgtaatcattttcattgattgaaaataaaacagacaaatgttgggggtggagaaagaccctgtgctggctcttatgtgcacggagccacagatagggcaggacctgaaggtctgagctcctgaggcttcagcctgtgactgtcggggtgggggtgggggtagcagggggacagagaatgactcaggctgtgatgtggttcccttttctttccgtaaggcagaacaggtggcctgtgaaactcagtgatgctgtaacagaacccaaggttgtggttttaggttgcagtggggacaactttgtagttgagcttccctccttcctcccctcccttcttctgtccctcccctgcgaaaaccttgtttgatatgctaggcactggcctctgctccagtgatagtcctggttcgaagagcttgcaggcagagggctatggtgtgccctgtctagcatagggctggccaggataagtggaggtggatacatcctgaacaccttacagatgtggtttgtatatccctgcaggaactactcagctgtctgcgtgtattcgcttggtgacattgacagagtcttccgtacctcatcgctcaaaggctaccacatgggccttcccaaccctcgacctggcatggtgagccattgaccaagcatggcccagaccccagcccttcctggcctcacctcccagtcatcactgacctattctattctcttccccagtgcctcccaaaaaagcagcccatacccacagaaaccttccaggtagctgatagtcacccagaggtggctcagagggtggaacctatggggccactgaagacaccattgttccattctaagtaccattaccagaaagtggtcgttcaccgcatgcaagccagcaatggagagaccttccatgtgctttatctaaccacaggtgattggctatcccagaactccccccccccccgcctttttttttttttttttttactttgtaaaatcagattttacatggtggcacatgcctttaatgtctcattactcaagaggcagaggcaggtagatctctatgagttcaaggtcagcttggtctacagggtgagttctaggccaaccagtggtacatggtgagaaaaagcaaagcagaagacataaaaggtacaaagaaccatgtaggtcacgcttgcttgggcctttaggtgtagatggagaattgagtgtgcagagctgtcaggggttagtgtatgcaggctgagaaagcccaggcagagagggagggcctcctagagaacatgaggcagaggagagaaaagagaaatcatgctgagttgacagaagatcttgcactagaacttgaggcagagacgcagtggatgagcagagccaggcgccgctttggtccagctgtctcaccctatggagaagccataggaaaagacgtggaaagtggaagttgggggtggggtgggcttgagcactgggcctcctgggagcctctgccattaggaataagaaccatggggcttctattagtctttggggttatgcaggtgagaggaaggatttgaaaagttggtaggacgcaaaaaatttgatgccttgtaacggagtttaaggcggcaaagcctgacagaggcctgagacatcctctcccctctctttcctgggggggggggggcttccctggaggaggctgagagaatgcctgagagatgctctagaaagccttgatataccctgagctgagtttgtgtctaccacctcatctccagttcgcattggggtggtatcctgcaaattgcttgggaggccattgtgggcctggccagagagaggccttcctggaaactagaaaggaccctataccactgggaccattcatcagggcccaggctccatccctccattgttcaaactccctccagcagcttcctgttgctgctccactttggggcttccttggccatgttggcccggtttgaagctagagaccttggggtcattgtttggatcctggaaatctcaaagagaggattttcccacagtacattggggatgagggaagggaggtcacacaggacaggacagggaagactggctaagagccctgttactcccttcctacatgtgtgggctatacatacactcagggattatggagggagtctcttatcttctctgtggcccatgggagaaacaccagtttagagcctgcagcatttagaaataatggggccagataaaaataaagaattctctgggttctcaccagagaatggaagctcttacagtgggaactggggtctgtttgcctgtttgtatctatgtctgcgtctgtcatggataaggccggggccgtgttgggtgtttgtcaggtttaggtagtctttggccacatctcaaagcccgcaggttgaaatactagcctggaggaaccatctcaggtaggcatcacctgactgcttttttggggcagatgatgccctgggaaatgggggggtggaaggagagaaggaaaaggctattctagaaactgggacagcagttgaggtgggattaggaggaccagggtcaggatacccattagtccccaacaggtgccagtggagagaaagctgctgtagcaggcagtctgcttatgtgaccttgggagtactcatatgggatctaaggttcttttcagatctaagattttacagaaattaaaatatcccttaagaccgagtgcaactcggaatcctggattgactccgggaacaaaaagcaggactcggtggaaaaacccaagaaacccaaatgaagtctgtagctgagtgaataggggcacactggcgtcaactgcttagctgtgacgatttactccggttatgtaaggctttcagctggggagactgggagaaggctagaccggggctctgcacgacttttctgaaaaacctaaaataaacagttaaagacaatatatcccctaggcacctaggatgcaagcagcttgtaaagaaaggccagatgtggggttctgacccgtctgggttccaatttgttccctgctgctcacgacctgtgtgaccttgagcaaattgcatagctttgctacaccccccttatctgcagagtaagggagataacacctacctcaaagggcagaggagggaaggggtgaccaaggtcatgcaaggcgtcgatcctggcttgcttttaaattttgcagcctccagtaagcctttggcatattgagggcactcactgagggaatggcttttggggatcagccttggaaacttccaggctgcccttgtgctctctgttccttcatggtcagctgtcctcaccccaccctaccccagtcctgtgacactcgaatgagccataactctcaaaccctccctgcccagagtctttcttctggcagcccagccttgaagaaatctgttgactgaggtaggtcctgtctattgactctctcctctgctcactacccacagacaggggcaccattcacaaggtggtggaatcaggggaccaggaccatagctttgtcttcaatatcatggagatccagccctttcaccgtgcagcggccatccaggctatatcattggatgctgaccgggtgagccatcctactctgtacccttgggacgacccagacagctggcagaggagagggcaactctgtttgcagtttgcatgtcctttcaaggacctctagggtggcagagttccttcttcaaagcttgaggactcagtggagggctcaggcctgacccagtcttgctctctttccagcggaagctctatgtgacctcccagtgggaagtgagccaggtacccctggacatgtgtgaggtctacagcgggggctgccatggctgcctcatgtcccgagacccctactgtggctgggaccaggaccgctgcgtgtctatctacagctcccaacggtacattggccccaagggaaagcagacctcagaatgggatgcattgaagggttacaggaggatcattctggggtcatatgaggagaggtggggcgctccgttacagcctctcagccgctgacgtttgctcctcctaattctagatcagtgctgcagtccattaatccagcggagccacacagagagtgtcccaaccctaaaccaggtatctcacctagccctaaccttggccccaggctattgaaggaggcacagctatgccttagtcaccttgatctgcagaaggcatgagcttgacctgaggcccctggaccatatcccgctgagggaactcccatgacgtcgggtgctcatgagagggctggggatgtgggaaaaatacaagaaaaaccccaaaagccaggatccgcaccccatctccaccgtgttccttttaaccttgctctagaagctgcatctgcagaactcagaggctcccaggtgtccctgacccctcctcattgcctgttccctcctattttctcagacgaggctccattgcagaaggtttccctggctcggaactctcgatactacctgacctgccccatggagtcccgccacgccacttacttatggcgccatgaggagaatgtggaacagagctgtgagccaggccaccaaagccctagctgcatcctgttcattgagaacctcacggcccgtcagtatggccactaccgctgcgaggcccaagagggctcctacctccgtgaggctcaacactgggagctgctgccagaggacagagcactggccgaacaactaatgggccatgcccgggccctggccgcctccttctggctgggggtcctgcccacactcatacttggtctgctggttcactagggcttctaggagctgggggcgccccaggcttctgtagcccaggagtactagaataatgtcacactcagccggccggcccggaagctccctgtccactgattcttccaggggtactgaataatccagtgggggacaaagggcctggagacgtctagccgcaggcggctgctggggcccaggtggggtagggacagtgagggactatagaaggaaggcgccgactgtgaagctgggccatcagcaactcaagactttatcttctcgagaatattttttcgaaatctcacacttgacttcatgcagtgatgcacctggcctgagagcccatcagcctggcagtgggctttgggaaggggagctgggaccccccatctctggaccttggggctgagtcctttgcgtccttccctgttccactgctgggtggccagtgtccctgcagacccgggctgctcctctgtacctccctcacagcctgggtcccaccggacagcgccttgcatgtttattgaaggatgtttgctttccggacggaagggcgggaaaagctctatttttatgttaggcttatttcatgtatagctacttctgactgcatctgtatgaaaataccaaaactacatgctggggttgggggggcgggtagagggagggtctgggaaggggggggctgatcccaggctggggctccctgggataggatcagagtccagggacaggcatgggtttgacgagagtggcatgagctggctctgccctgggagcccagtctgagggcatgagcctccagtgtggggggtggttacgggaggggtgggtgagggagacaggggagagcgaagaagaaaactgagccctaggttgatttgccgtggtcattttgaaggaggagccgggtccacagggggaggttccaggactctgcccttggcattgtgggttggggggcagggggagtctcctcccttcccctcagcccccttccccaggggctgtgcttccatgctcctaacctcccaccttcagctcaggacatgtcctaacttaggctaaactgtgaaaattcccgtggagatggcccaggccgagcttcccaagtgggcctcccagcccacagtccatagatttcagcagagagctgacccttctccagctgtgtctggggcagggcctggggccgggggccttccagcttccgtcccttatctcttctcaatgcactttaataatgtaacatattactaataaacaagctatttatttacctgtgtctgtgccctgtcttccacgcctgtggtgccgagtaggactccagcttgtcactcagtacctcctgccagtgtgaacatcaccacctcagcttcccctggtgatcctgctagcaggagggctcagaggacctcggctagaggtggggggggggcagggatggggaatgtgagcctgtagcccctcccctcctgtagctccaaccccttcccttcccttgggagacctggctaggatcactctatgggcagttaccaggccttcctaccttcaaggtgaaggggtgaaactgaccaacgaggaacactaggatgtggtgatagaagggtgtgtgcaggaggctggtggtgccaggatatgaccaaggaatggttgcttgctcttggccaggctgctaggaaggaaaggagaagggattgggacagagcaggctgcatgcctttctgtctccaccttgagcatcccctgttggagaaagggctggagcagggacaggtgagaaatggcagggaataaaagctgctcagtgggtggaggtcaagactaaggacagtgaccatgggataaaagtggggtaatacctgacagctcagaaatagatgcacccccagtgaccttccttccagtttcctcagccccattaacaatgtgttatttatatatatttacatattgcttttatttaaattaaattacacattttataatttttatattatttaaagatatataaaatattttataaatatataatttatatgtataaatttatattcttttatgtgtacgggtgttttgtctgcatggatgtctgtgcacagtgtgcatgcttagtgcatgcagaaaccagaagagggtgttagatcctctggaagtgaagttacagacggtaatgagtcaacatgtgggtgctgggacttgaacctgggtccttgaagagcagccatgccttagagaggggtgcacggccaattggggtcagtttctcatagcccctaagactgggatagccctcaccggcagcatttcctgttcattgggaccagcccagggcttattattaggacactttttccccttaatcttcccagggtggcaaaaatagtgaaagtggtagggactgtgggccttgaggaacccagatctgtggctggagcagagtcctcagctactggtgcctattgtggtctggggcagactccttccctccagagcttcacaggttctagttccagtctatctgttctccatcttatagttaaggcagcggcagcagcacgtgacttcacagcctcctcagcgagacctcagatgaagggaagaaatgggcttcagtccccacgtgagcagagcaactagtgaggaatgtgagtctaaccctgactcttcctgggtcactgcgtgatctctaggatgatcactgccctctgcacttcaacagccttcctctgccctttgggaatgctcagggtatcctgatgagtctgtataagggacttgagtgactaagcacactcctttgtctctacaaaggcccagccaggcagaagccttgtgtatccaggcatgacatgaacccatgtagatcccatgtaaatgagccatcagacacgggcagctcgggaacaaggcttttgtctgtttgatctgatgggtgatcagcaccaggggcctcagtccggcagtgggtagataggactgttaaactaggctcagtggcaagcaggtctgctgctaggatagccattggatatccatgacgccaaggatgactggggatgggagtgagcctcatccctctacttctgtcttatgcattctctcttggaagcaaaggaagggcaaagtctgtgaaggaccaaaggctagcccctggggaacttaactgggggagcaggaccaaaggctagcccctggggagctcaactggaaatccctgcttcccctgacccctgccattcctgggcccctggctggcaatagaggcctgtttgtctctaaaaatccctttagccactccctctatctgctagcccatgagccctgatctaccctcatgccttatgatcccacctttcagtctcccatctacggttcctggaactcccacgccttgattcctgtgaattgtctccctgggatacaagaaggaggatgcttccagatgggggatttcctgatgacccagagtgaggatctctgggctcatctctcctcagcttgcttgctccagaggctagaggaaacatttggaaaaatgtgcgtagatgcaggccccaggagaaaaggcactgtagggaacagaagctaggtgacaaataacaaccattgatgagatgaccccaggtcagagatgggagcctggaggtcgcccaacctacctggcatgctcagaaaaggctttagagcgaatataagctcccctgccccaagaagagaatggcaatgggagagaaaggaaacattttgccaaggaaggggcagggtatgtgggcctgtgggcctggctgaagtacagcaaactccacaaagacaggaaacctcgccagcgctgctcacagctaaatccccaacacctgggccagtgcccagtccccaggaggtgctccgaacactttgatgaaaggaaggaatgtcaggaagtgagactggacgacaacttcatcatcacgtgccaaggccccagatctttaacctgcaggtgctaaggagtcatggcaggacacacggcaggggtggggaatggtagtggggatgataagatgggtgcagcctgaggtctagttagttctcatacctgatccttacctgcttcaaccaaaacaccacactcctcctttggtgttcagaactccttccgaagcctaattttagtctgccattatctagccgaagaagaaaatggagccatcccagctagggtgggtgatcccggtgagggtgccagacaggaggtctgtgggtgtgggcttgtggaaagcaatctgaaacagctaaatcagcctcaggaagttctttcgtgttggtattggttagctagggagaaagaaactttggggagaaaataaacatattgtcagggtcaccagtggcagtgagccagccccacaaagggaatgacacaggaccacatcccggaggcagttggtgccagaaccgctggccttgaccctgacaagggttctgcacttagacaggcagttgctccaggttaagcagagtaaatggtcttagagaggcacagagaagggaccatctttaaggttgggcctgcatcaccttggacagacacaggcctgttacttgacctagctattgctcctgcagctacagatgtcatttatcaactgtggtatttctttctcctgactcaaatgagtgttttcctctacaactgtacccttctggggtcactgtgccctccaaatgtgacttacctgatttaagatgtctaggaatggtaaaagacacactggacttcaaaaaaatctaaatacgggacaggcatttatcttaaattgctatgtggacaacacattgcaatgacagatttggtttgttgttgttgttactattttgttttatttgaggtgtgtctgactgtgtagccctggcctggaactcaccatatgtaccactctggcctcaaacagagactgcttacctctgcctcccaagtgctaagattaaaggcatgtgccactacacccggctatttttaaaatccattttttttttgttatggatacatgtatacaccttcgtgacttcatgtgctccttgtgttccggtgccctggaagccagagggtgttggatctccaggagctggagttacgggtagttgtgaactgcctgatatgggtaccgggcgaggacccacgtcctataagaaaacagtgagtgctcttaaattctgagccacctctccagcctcccccgtccctcacaatctatttgttttattttatttttgagacagagttgcactgtgtaactttgataggtctgaaacacaccccacatagaccttgaactcacagaggctccttctgttgctgctgcaggctgctgggattacaaatctatgtctctgcacccagctaatttcacccatttaaaaaacaaaacaaaacaagacaaaacaaaacaagacaaaacaaaacctttttcctaatgtggcttactagaaaatttataattatctctgtagctcaatatcacatttctactggccagcacagagcgtggagaattttgtcttgttcccaaatgaatctccagcagttagaacagtgtgggacatatagtaggtgttcagtaagatggtcacagatggaatgagggagcccatgttctgcagggagagaccagttcacccagtggaacatagttgttgttcggagcccatgtggatcttccaccactgggttgctgcccccatcggtgctttttagcttgtagctcttctgccactcagaagggcagctcaagggggacctggatgcctgggtgaatgccctgctcccttgagagttttctaagaggggactttcaattccttctgctcaggaagccgggcagcttgcaaatggtatggaaatcacctctccacacaatgtttgcatagggggttgatggagatgtgtccagtccactttctgtcccccaacaccggtccctaggggcaaaagaggaaactctgaaggccttgaggtcctggtggggtgatggtgacttacaggggaatgggccaccttagtctttccccagtgaacaaagccttatagcctggagcatccttgtctctcaaatcgaacaggagcctaaaaatagtctgcagttccagcctcccccacagccacccgcgccaagccgggcccgcgcccgccagctcctccgcagtccagactgtctgcacaatctgcccaagccactggccggctcctctgtgtcctggccctggggaccctgagtcagcactcctctcttcggcctgctgaggtctgcctcctgttctgcccacccaaacaaactgagcccactggttcctgggcttccagataatggtgacctagccacttggttctcgtggggacttaggcaaactgcaggtctccaggcaatggaagctttgggcaaagccgagagcttgcgagagagcctgcagcatgtggcagagagtaggagccactggggttacgtggggatgattaagaaggattcaggagaggtatgagaccagcgatggcagttggctccatcctacatacagactcctctgggtagagcggcatctctgtccagccattcatatttcatgctgcacttaggagtgtctccctattttagggcttccacacttttcggtaagaagtcctatgtcttcctgccttgaaattcttggactttccatcttctgggcactgcagggaaaagggaggcctgttctcataggcccagtgagggtaagtcctttgttttagatgtgggaccagggctccatgtcctgattcccagcctggagccctcctccagctctggtcatggttgctgggtactgtaaggagcacatcaagtttgacctatagggcttagaggttcactcttgagagagctttcctgtggcaaaaatgagtgagcaggtgacacagcagaagtgtgagttcccccatgctccctgctgcaggaagtgggccggcagaagccacaatcaccttcctctccccgggacagctttaggggacgccaagaggaagacactgagatcctgggatggttcttcctatggccggcgccagaattctattaacaaagccccgtcttactgtgtcatttcccagtagcccttggaggcagagtcatggtgtagattctacagtccgccattagacagacagggagaggatgccctggagaaccagtctcatgcccagaattacctgatctttagagccaggcctagaagccagggctcctgactgcctgttcccgcctacacacagccccctcccccaagaaagcaggggtgggcagaatctagagggttcccatcaaggtgaaggtgtcgggggtggggtgggacatttcaaaaccttgaggttttctcacctccatgtcacctctgcttcttagcagatgtgagaccttttcactgtgcacattggcctcttgggataggccagatagttttaggacctttgcccctggctctgagtgtctctgtctcccagctgcctcaggagccctgactcactctgcatcctgcatgactagggctctatctagtcttcatttctttttctgttgctgtgaagaaatattctgacaaaagcaattttagggagataaagtttactccggctcaaagtttaaggattaacgttcattgtgaccaagaattcaaagggtagcgggagcctggatcagttggtggcattgagtaacacactcaagaggcaaagagcggtgatcagatactgtcccagagtcctctctccacttatcacctaggctcccctgaccagggcgtggtctcacctctaattaacatagtctttcctcattaattaatctcatttccattctccataggcatgcctagaggcccatctctcagatggttctagatggtgtcaggttggcaatccacaccggccaccacaggaacccagagtcacttctcagctgggtcaaactgtagccctaggagagttttcagattgggcctgggaatgaggaggtgtagggcctgttgcctaagccagcccttcctgaactccacctgtagactcttgacctcatctggagacacccctaccccaggcctaagcacaggcaaagcaagaagatgcaatgggacctctgccccctgtgatcagaggctcggtttgctactgtctcaggctcattctctctgtgtgtccccccaccctcacccccgttttctcttgagcctgttttcttgttttcactcacgtgaaacacacatgggagaggagaggggcagcacacgcttgcgcacaagcacacaggcaccaacatctgggctgctcacttgagtaaacacacagacatctgtgcacatgttcacttcagtctgtcgcctttccagggtccttggggaatgtgtgtgtgtgaagctctctttgtatgctctctactgggaactggaagacacaggctgagaacaccattaatacccagggctttagtggggaacactaggctgtggtaacctgccagcaaagagagtcaggggtctcttggaagcaagcagagaagtaagcctttgctgggggtttgcttagatgtgctgtagcccacctgaggctggggccaggggaacactggactacaatctgcaggaaggaagtctgactatgtgtcccacccatggaaggcttgggactagatgtccccggggtggacaatcttgatgactagggctctgtttctgtccctgcaggacaatgggccggatgaggtcccgccaggtgttcaggtttcctgggcgggctggtactttcctggaatgcccaacctttttgatgtcctaggactgaagagatttcacggaagcagaggtgggggtggggggtggnnnnnnnnnnnnnnnnnnnnaggaagtccttagagacactagggacatggtctgtccttgtgtctgggctcaggaggcacactgagcctgtctcctcccagtcccccttaacaccatcatggcctgctcagagcacctgatttttatgggctgtgctggaagaggcctgtagggtcagttagagccaagcctggcaccaggcaagggccacttctctctgccagacaggattaaaatcctccaggccagccgggcgtggtggcacacgcctttaatcccagcactcagagggttggggggaggcagaggcaggcagatttctgagttcgaggccagcctggtctataaagtgagtgccaggacagccagggctacatagagaaaccctgtctcgaaaaaccaaaaaaaaaaaaaaaaaaaaaaaaaaaaatcctccaggcctattcccagggctgggctgacccagcagaagccagagaacattctgaaacatgtcacctctatctcccaccaaagagggacactaatcagtcaaccagtctgacttcagaatattcaggttaactgctattaaatataatagaggtgaacatataccaagtagcacacacctccctgcctaggactgtctggaaagataacaagaaggactccgtgggtaaaggtgcttgctgccaacctgacgccctgagttcgatcctccagaaccctcgtggtgaaaggaaagaactggctaccaaatgttctctttctgacattcacaggcaatgctgaggcaagcgccccttcagcatacacagtcgattaatgtatgtaccaatcattttaaaagagaaatatgacttatcttagagagttttcataagctcttggagattggtgctgaccccaccccaactcctgtgtgtgtgtgtgtgcgtgtgtgtgtgtgtgtgtgtgtgtgtgtgtgtgttcctaaagactgaacctatggcttcacacatgctataggccccactactgggttacatccttaggtcctcttcctcttcttcctgtcctttttaaattttgaaacaggactgacctggagcctttgttcgcagtcacattgcctcagcccctgaggttacaggctgcagctgtctccatactcagttaaaggaactcagacccaggaaggggaagctgtttaccagagcttcatggctctagaggtacctggggttttagactgactccatcactcttatttatacactgcatagctcgccaccgagcatctctcgttgcttagacacatggttaacacagcgtatacagcagagatggaggagagccactctctggcaagatcaccaagatggggcctgaggcagaaccgactccagggtcagggattcctggacacagtcagttaggacttaagacttggtcatcagaggaaggggctgggatcatctgccccaagacacatggtacttagagaggcgaagtgcttagccattctaactttttccggaccagagatgactgggtgggatctggatctggccccttggcaccctctgtgggtgccttgaggcttagctgggatgtctcttggggcagggtggggatgacagctttttccgttgctggttcccatcaaaaccatcccaggaagaactgaggtgtagctcagtggtgaagcactttcctaacacgcacaggagggtgggcggcgggatggtggttcacagagcagctgttctaa

SEQ ID NO: 152 - DNA, 2606 bp, Mus musculus
gcgggatgacgcctcctcctcccggacgtgccgcccccagcgcaccgcgcgcccgcgtcctcagcctgccggctcggttcgggctcccgctgcggctgcggcttctgctggtgttctgggtggccgccgcctccgcccaaggccactcgaggagcggaccccgcatctccgccgtctggaaagggcaggaccatgtggactttagccagcctgagccacacaccgtgcttttccatgagccgggcagcttctctgtctgggtgggtggacgtggcaaggtctaccacttcaacttccccgagggcaagaatgcctctgtgcgcacggtgaacatcggctccacaaaggggtcctgtcaggacaaacaggactgtgggaattacatcactcttctagaaaggcggggtaatgggctgctggtctgtggcaccaatgcccggaagcccagctgctggaacttggtgaatgacagtgtgatgatgtcacttggtgagatgaaaggctatgcccccttcagcccggatgagaactccctggttctgtttgaaggagatgaagtgtactctaccatccggaagcaggaatacaacgggaagatccctcggtttcgacgcattcggggcgagagtgaactgtacacaagtgatacagtcatgcagaacccacagttcatcaaggccaccattgtgcaccaagaccaagcctatgatgataagatctactacttcttccgagaagacaaccctgacaagaaccccgaggctcctctcaatgtgtcccgagtagcccagttgtgcaggggggaccagggtggtgagagttcgttgtctgtctccaagtggaacaccttcctgaaagccatgttggtctgcagcgatgcagccaccaacaggaacttcaatcggctgcaagatgtcttcctgctccctgaccccagtggccagtggagagataccagggtctatggcgttttctccaacccctggaactactcagctgtctgcgtgtattcgcttggtgacattgacagagtcttccgtacctcatcgctcaaaggctaccacatgggccttcccaaccctcgacctggcatgtgcctcccaaaaaagcagcccatacccacagaaaccttccaggtagctgatagtcacccagaggtggctcagagggtggaacctatggggccactgaagacaccattgttccattctaagtaccattaccagaaagtggtcgttcaccgcatgcaagccagcaatggagagaccttccatgtgctttatctaaccacagacaggggcaccattcacaaggtggtggaatcaggggaccaggaccatagctttgtcttcaatatcatggagatccagccctttcaccgtgcagcggccatccaggctatatcattggatgctgaccggcggaagctctatgtgacctcccagtgggaagtgagccaggtacccctggacatgtgtgaggtctacagcgggggctgccatggctgcctcatgtcccgagacccctactgtggctgggaccaggaccgctgcgtgtctatctacagctcccaacgatcagtgctgcagtccattaatccagcggagccacacagagagtgtcccaaccctaaaccagacgaggctccattgcagaaggtttccctggctcggaactctcgatactacctgacctgccccatggagtcccgccacgccacttacttatggcgccatgaggagaatgtggaacagagctgtgagccaggccaccaaagccctagctgcatcctgttcattgagaacctcacggcccgtcagtatggccactaccgctgcgaggcccaagagggctcctacctccgtgaggctcaacactgggagctgctgccagaggacagagcactggccgaacaactaatgggccatgcccgggccctggccgcctccttctggctgggggtcctgcccacactcatacttggtctgctggttcactagggcttctaggagctgggggcgccccaggcttctgtagcccaggagtactagaataatgtcacactcagccggccggcccggaagctccctgtccactgattcttccaggggtactgaataatccagtgggggacaaagggcctggagacgtctagccgcaggcggctgctggggcccaggtggggtagggacagtgagggactatagaaggaaggcgccgactgtgaagctgggccatcagcaactcaagactttatcttctcgagaatattttttcgaaatctcacacttgacttcatgcagtgatgcacctggcctgagagcccatcagcctggcagtgggctttgggaaggggagctgggaccccccatctctggaccttggggctgagtcctttgcgtccttccctgttccactgctgggtggccagtgtccctgcagacccgggctgctcctctgtacctccctcacagcctgggtcccaccggacagcgccttgcatgtttattgaaggatgtttgctttccggacggaagggcgggaaaagctctatttttatgttaggcttatttcatgtatagctacttctgactgcatctgtatga

SEQ ID NO: 153 - protein, 659 aa, Mus musculus
GMTPPPPGRAAPSAPRARVLSLPARFGLPLRLRLLLVFWVAAASAQGHSRSGPRISAVWKGQDHVDFSQPEPHTVLFHEPGSFSVWVGGRGKVYHFNFPEGKNASVRTVNIGSTKGSCQDKQDCGNYITLLERRGNGLLVCGTNARKPSCWNLVNDSVMMSLGEMKGYAPFSPDENSLVLFEGDEVYSTIRKQEYNGKIPRFRRIRGESELYTSDTVMQNPQFIKATIVHQDQAYDDKIYYFFREDNPDKNPEAPLNVSRVAQLCRGDQGGESSLSVSKWNTFLKAMLVCSDAATNRNFNRLQDVFLLPDPSGQWRDTRVYGVFSNPWNYSAVCVYSLGDIDRVFRTSSLKGYHMGLPNPRPGMCLPKKQPIPTETFQVADSHPEVAQRVEPMGPLKTPLFHSKYHYQKVVVHRMQNGETFHVLYLTTDRGTIHKVVESGDQDHSFVFNIMEIQPFHRAAAIQAISLDADRRKLYVTSQWEVSQVPLDMCEVYSGGCHGCLMSRDPYCGWDQDRCVSIYSSQRSVLQSINPAEPHRECPNPKPDEAPLQKVSLARNSRYYLTCPMESRHATYLWRHEENVEQSCEPGHQSPSCILFIENLTARQYGHYRCEAQEGSYLREAQHWELLPEDRAEQLMGHARAASFWLGVLPTLILGLLVH

SEQ ID NO: 154 - DNA, 43329 bp, Homo sapiens
cgtgttggccaggctggtttcaaactcctgacctcaaatgatccacctgtcttggtcccctaaagtgttgagattacaggcatgagccaccgcgccgggcctcctttcatcctttcaacaaacattgactgagcctccactctctgccagataaacatgacggtatctttgctctgacaatgctgtgttgttggtaagatggacaaacagatgattgcattaaagcctaatgagaactgggcgaggcaagtctaggggctgtggcgctcacaggagagggggctaacgtgggctaggggtgggggtgtgagggtgagggaaagcttcatggagaaagtggcactacgctgagacctgaagggtaagggagaattgggcacgaaggtatatgtactgagggggctgggagtggggagcaaacctggcttttgtagccctgtttgtcagggtggcttgcaaggcaagtgggtgggcagaggctagatcatttgaagctatgtaaggaatttagacttaccctggacaatgggagtcacagaatggcaatcgggagagagtccaatgtgtgttttagaaaggtcattctggctgctgtgtggtgagtatagtgggagtagaagactgagggagggcaggcatgaggaagccggggaggaggctgtggcagtgatccacttagagctgctggtaggctgacctgacggcgtggcagtggggaaggagaggaggaggtagagaggctttaggagttagaattgataccagatctttgggaaaggcgagtatactgttgtctccactgaacagatggggacaccaaggttccaagggttgaaatcatctgcccacagtctcatgggcaggaagtggacaagtggtcccagaaactcaggtctgtcttactccagagctggtgcccttcctcccactgcccttggcctctgaagtgtggaggaatgggagatgatgagggcttagatccggctgaggagctagggctttatcctgagggcaaagagcacccctgaggcagctgcaggcagggcagtgggggaccagatctgtgtgtgagataatctgacagctgtgtggaggctggatttgtgggaagtgagatggggtaggcgaccagctaggaggctggctggatcctccagatgggacatggagggggcctcaactggagctgctgcaggggagctgggtggaggggagctgctaggtgtgaaggacagactagctctgggggctgaaagtggggaggcaggcaggatgtgagcaggcggatggtggtgcagcagtaagaataagggactggggtgacaatttggaatgaggtgccataggacagccaggtggggatgtgtataattaaagacagttggatgtctttgggctgaggtagtgatcaggaagttctaagttgaacactgggcctgtgtcatgtgagaaggcaattaagcttttcagagaaaggtagaggaaaagggatacccactaaggagttcagctttatagaaaatggtgactgatagatgtgaggcatggaacgggcgcaggatctgctgcttctgggaaggtgagagcaggagtcagcaaagctgagggagtgaaaggacctggacaaagagggcatgctcagtggggtcagatgccacagacaaacctagtaacagaagggctgaccttggacttgttgacttgtgccttggtgaccttggggagacattccaatggaaccggagccagatagcaggggttgaggactgaataggtgaggggcagtggatgcagagagggcaggggaccttgcttgtgagggagaggatagtagttagaggagagatgggattgagtgtgagtttttgcagttcagcagaggtgaagttggaagtgatcacaagaacttttctaggaagctgagggaaaaaaaggaaaagaccccaaaatagaatatgcaaatatgtagagatgggtgagttttctaacagatccgttctcctgatataactcaaatttggctgggctggtatgggctgggctggcacagcttgctgggcacatgggccccagatctgctcctcgcctcagccccatctggcctgggccccagaccaagctcacagagccctaccctgaggtggcttcttgttgctgttgccacagactttggccctgggtgtttgttgaggatgttggggagtttattcaggcctccctctttctgcttacccagcctctccagcaggtggggtcccctctggccctgggctgggctcaggtcagttcagctgtgcccctagttcctctgggcctgggcctgtctcgttctcataggctctgagatcgctgggaatagaattcaacttctatgctagaaatgctttcgtggcaacccaggcactggcctactctatcttggcaaaactagctaatattaatagtacattacacagcacagtagtgcttatttatcaagcatcctctctgtgccaggcattgagctaggcactcacatgtgccatcttagttaatcctcatagcgactctgaaaactagatattattagccccatgtacagaggagtgcttcctgtatgctggggaagtggcctttctagggcttgggtgggattgtgtcagcatgattccatcagtgcacccacctggggccttgtgcctggctggccgaagggtctcctaaccacttacctttggagtggcagctcaggtcttggaggggacttaggcttctaagtcagattgaggtttagattgcttttccacatatgacctaacttcttggagcgtcagttgtgccttgtttgacgttttccctcaatttctataagtggatattgagtatgtgtatcagagatgccaggcactcagagctgggccagtgaatgttctagatggcatcagggcccagacaatgaagtaaccctaacaaggacagaagcaaagaaagtctaaggtcctgcagtggggaccagaaattttttttttttttttgagacagagtttcactctgtcacccaggctggagtgcagtggtgcaatctcggctcacggcaacctctgcctcccgggttcacaccattctcctgcctcagcctcctgagtagctgggactacaggtgcccgccaccacgcccagctaattttttgtattttcagtagagatggggtttcaccgtgttagccaggatggtctcgatctcctgacctcgtgatccgcccacctcggcctcccaaagtgctgggattacaggcatgagccaccgcgcccggccaagggggaccagaaaattaattgctcttatgcagaatcgagtctcatttcttctcctgggcccagattcaataatctttctcaaatgagcatcccagagagccactactgatggttgagaattggcccagggataaccctgggctgagatcaagaggatttaacaacgtgttgtctcaacccattaagagtgcctttagaggtgctagaataaggaggaaggaagctagtctttcagccctttactgctcagcctccacactaggtgttgtgttctgatctgaggcctgatctttgaaagagagagacacaatctggactgtttagcacctaggaggggtcagtaaaagtttgctaaatgacggactgatcgtgtcttagaaatcaaccaggattagagagcctctcaaggaaagccccatgagggatctatttgaaactggagttatttaccctgaataaagagccgatttagaaggatgtgacctctgtgaaatcactgaagggccgtattccaggaagagagattagacatgtccttgttgcctcagagggcagatttaggaccactgtttgggagtcttccactggggaagaaagctctgtgtcagagctaaacaagatgggcaacgctggcttgtgagggagctcatcatcactggaggtatgtaagcagaacctgcatggccaccataaggagtcttgtgagtggctctcaggtaggactgaatcccctttgacagctactcctaactccaggaattgagattcttggatcattatattcatgaaagaaagtgaactgtttgtgggtaaccacccttttgcatgtgtatctcctcactgaagtggcctcagcaggcccaaggatcacatcagagctgggagggtcctgggacatcttctctcctatagacatcactttatttttattttattttagtttagtttagtttagagatggagttttgctcttgttgcccaggctggagtacaatggtgcactctcggctcactgtaacctccacctcctaggtcaggtgattctcctgcctcagcctcctgagtaactgggattacaggcacacaacaccatcctcagctaatttttatatttttagtagggacggggtttcaccatgttggccaggctggtcttgaatttctgacctcaggtgatccacctgcctcggcctcccaaagtgctgggattataggcgtgagccaccatgcctggccgacatcatttaaaagcatatttaattcatcctatagaaggaaatgcagaagatggaatgagaaagctttgtctctctctgatacagagagaagatagaccaggagaagagatggagttttagctcttctttctcattttgtacacaaagaaacagaggcctggactgggtcagggccttgcttgagtcagtatccaggctgagacttcatctttggcctcccagccatgtctagtcaggagattttgttagtctagatggattctatgtgacatccatgagattctgccctgcctcaggctttggacagtgagaatagaggctcagagatggattaggggcataggaatgggagggagaagtttgtctccagaaagtctggggagtgtctatcacataaaagtgcatgtagaatgtatgactagaacagagagcagagatgcacttggtctttgctaagactcggctctgttccagagtggccaccaggtggcactcccaccacaagcccagtgccacgttggccaagtttggggcttggggctaaggatgttgctgatttgtctgtggaaggcacaggacctgtagtgttttcaggtgagctgagtgccctgctagaaggaaaaaaaatctgtctcttctctgctgactgaatattcctctttggatttttcctttgtcttacttaacttggctggccctacttagatcttagcaatttaggtagggttgatcagataaaaatgcacgtagaatgattaggatagaaagcagagatgtaggcatgggatgctgctgggagcacgaccctcagggctaagaaggtggtggcagttctgagaagttctccattcacagtgggctgaactgatgtatggaaggtggtgatctctgaactggtctaggaggaagaggcaggcacttgaggggaatgtcctggctgaggtttggaggcaggcagagcactgaggggagggtgaggcatggcctgggcagcctgagaagtgtcttcttggcactccttgcctgacatggtctgccaagagttgggccaggtatagtgactgtcgtgcctgtgcctgtgagatagtcacagtgggcacatggtatgttgggggtcccagatatgggccccagacctgtttttatttgcccatatccatcctccttaacttttgaattatttgccaatattttaaaagagagagtttcaacaaagagtcaattttcttttcttttttttgatggagtctcgccctgtcacccaggctggagtgcaatggcgcaatctcagctcactgcaacctccacctcccaggttcaagtgattctcctgcctcagcctcccaagtagctgggattacagttgcgtgccaccatgcccggctaatgtttacatttttagtagaaatggggtttcaccattttggccaggctggtctcgaactcctgaccttgtcagataaaaatgcatgtagaatgattaggacagaaatcattgaccttgtgatccacccacctcggtctcccaaagttctgggattacagccgtgagccaccacccctggcctcttttttcttttcttttcttttttttttttttgagacagagtttcactcttgtgtcccatgctggagtgcagtggtgcgatcttggttcactgcaacctccgcctcctgggtttaagtgattttcctgcctcagcctcccaagtagctggaattacaggcgctcgctaccatgcccggctaatttttgtattttttagtagagatggggtttcaccatattgtgcaggctgatcttgaactcctgacctcaggtgatccacctgccttggcctcccaaagtgctgggattacaggcatgagccaccgtgcccagccctcaattttcagcttctcttgaaaatcatactacctttcactactgggtttacttcttcatggttccatgggctggagctgagtcgaaattgccttatagacagcacagggttctgcagaccccagcccacccactcccctcgttctcatcagttccaagtctctgccccctgcaataggtagtaatggtggtaggcaataggaattgttgctgctgttagtagccaggaggtctgaatggccaccaagctctgaggcctcaaagaaggggtgggatctagcatggagggggctgttggggattgaatgccctctgagagctacttctaatcctaagaattgggattcttggatcatcgtatctgtgaaaggaagtgaactgtgtgtgggtgacctcacgtctgcatatgttatctcctcacggaatccttctatctcccacaggcctcttgtttgaggtgggtcactcctgtgaaggccatgtgtagccatggaatcagggctgaggaggaggtcagataactctggagaatggaaggatgagttaagttggaccctgaaaggtgagaggctttagttggaatgttggggggattgcccggggcttctgccactgcttcaagaccatgaatctcaggtctgtgtgtatccatttctttcattccaaaaggagccttcttggattgggctgtgcctcagctgtccatggggctcaggaagtgatccttctcaaggtatttttcttatcgatagaagccctgcatcatttcttcctccctcccctgaatgtggaatcatggagaagggagggacaagaatgtgcctccccatcagacgtgtcagcatccacatgtgttgcttcctctgctggtccacttcccatcactggctgtgagtgggaattgtgcccctgttcttggtccaggctcaagagccagccttggcctccaatgaggcaggcaggcctctgacaccacctataccattctgacttgattttcctatgctgcctgaggcaggaaagtccatgcctaaactctggtcatagtgcctgccccacagtctagctgcctttccctttataaagttattgcctcaagtcatgggcttagttctctcctcccctggctgcctgcagccaaccgagagagtgggctgccatctcgcctggccctttgtccccaggttggctggcttgtggggaggatggtcttaagtactacttccttcccccctaccccccagtctggaaaaaaaattatctggcatctaccccagtttccatctgctactctgttgattgggagattgagcccattccctggtctgccctcctactcagcacctggtgacctgggccctatctaggtccttctggggatggtttggacccagacttcagccacagacaggaggcagcagtgccagggtacatcacacagagagaagtcaagggtgtgggtccttgagaaaccacctgagtttcaatccgtcctgcctctagttgtgcgatcctggcacttcacatcccttgtctgtgccttgatttcttcatttgtaaagggaggtgactaatagctcctatctcataggagtgcgaagattgaatgagttgggagaggctatgagatggcacagcacataggaaccacagtgttagcaattgttattgcagtcagaaaacccatcttcgttctaccatttaccggttgacctcgggcaggtccgtccttgtccctccctgtacctcagttttcttctctgcagtggagttacgctccctccctcagtgagaggaagagagtggaggactggcagagatgaggtaggtgaatgtgggttatgtgttgtgagttgccatgcacatgggcagtgttatcattgattttgaatccatttgaattcttagttccaaaaggcagagacaggtgatttcttagtttgccctagctttgcatagagaggacagacactgagggcaatacctgtctagcaggtgaaaccgaatgtccatcttagaggctggcctgggccaggctccactgctggcttcagggccacaggcttaggtgcaggcctgaggaggagctcttagactgtccacagcctccctctctggggcagtgtgcccctgtgtatcaggaggctgttggcttcacccagtgggccaggaacctcactctgcactgtctctggaggtaccttgagtttaccttcctggcctgctggggtgcctcaggactctgagggaagaaggaggggacaactggaagcaaaatgtagaatggtaaagccaaacttcttggtagcaaaactttcctggttccaggaggtaaaaacaacaaccaaatggtcctggccccatggagcagggcagagggcagagggcagccagcccaccgcctttgctggtgtctgcagtgcgtgaatcgtgtctaggtctgtgagttctgaaggttggatattcacctctactccttcctcggcctgtctcctctcagtgcagctagacatccagtaaacactagataagtacttactgagctgggtggattttccattcatggttccctggggcacaagtggaagtggtaggtctgggccctgtctggtctagagagaggagacccttttacaaagggcaggcacgtagttctgagaggaggagctgatggcagagctggctggactgctcaggtaactgcagagggtctgggcctggaccccccaagggagtccccactgaatggtcaggttgcctgagatagctgagccctaggcactttgcgggcagagatccccttaagctgctttgaccctccctcccccacagtgagtggggcacgggggatgctcccctctctacttggggaaggggccttcctaattatatccccctccactcacatggaaatgagtttggattttctgagcgtacaccagctggcttggggggaggcagcccagaaggctgctggctgggaaagggaggagaaaggagagggaggggaaggagccaggccaagatgaaaaatttccagtgttctcccaggcaaagcaacagcgggtccctgagtgctccccacatatcatcgttgtgcctgctggtaggctcagcagggagccgtgtccacttaggcgaacgcatcctccgaggaccatagtcctcagggtgcgaaccacttagctggccatagcaaggttgttgggtgttggactcctctgcgcccttggagagaggtcctccacgacttctacgccaatctttttacggggtgcggggagtggaactgaggcccagagaggggatagggcctgccgcccctggcagaagaccacaagtctggcttgtccgcagctgggctttccccgtagagttgcccgggagagggtggcgaaggttcccccagcagttccgctctcgctcaggaaagccagtgaggcgagaaaaggctgcgaggggcggggggaggggcggggtggggtcagcgctggctccgcctcctggcgcttgggtctgcctgcggccgggcgctggctcagtctcggctgattgccgctgtcgctcccggggccacgggatgacgcctcctccgcccggacgtgccgcccccagcgcaccgcgcgcccgcgtccctggcccgccggctcggttggggcttccgctgcggctgcggctgctgctgctgctctgggcggccgccgcctccgcccagggccacctaaggagcggaccccgcatcttcgccgtctggaaaggtaggcggcgccgcgcggccggtcaggcgcgggatcagacgctgcgcggggcgggtgcggagtgtgctgcacccggagggagtgcgtgcgcgcagctctgcgggtcccgggctgtccccgcgctgtccccgcgtggagcgtgtgggtttgggtgagtgtgtgtgagtgtacacgctggcacaccagagccggctgtaacgctgcggcgagcgagcggcgggggccggagccccggctaagtcgcaccaagtccctggcaaccaggagccgcaacgcccgggcgccaggggagggggcgggcccctctctcggccccgagccactctgggtcctctggctcgggggcttcggcggaggacctttccccgcctgggaccccaacccgggtaccctccttttgagctgcgggctctgctggcgcgcggggcgcaggctgggccggcaaggggggcgcggaccccttgccgccgccgccgcgcttcggcagcgggaacaaagaccccgccgcctgcccccgcccccgccccggcccggagctcgggccaggcaagggggtgggcatcctgcagcgagcggcgggacatggtgcggtgcggcggcttggggtaccagggcgctgcctcagcaatgccgggaccggccgctccccccttgcccgcacgtggcagttgtcaccagaaatcggctccagcgttggggggcagtgcccgttgggtggggcacggccgttgggacccccaggcggtggatctagggcgggggtgcagcctttaggccagggtagataataagaacctgggggactggagtctcccccagggcacctcagtttagaccctgtactatgggacagaaagccggttaggcgggggtttgaggctttctgccgcgaggaactgatctcccctcccctgcattgcacacaaatgcctccccgcccccagtccgattcggctctgtccccaaatttggcgtgtctgcggcccccctgtcgtgatggtgggggactcgcagtgggggctgggggaactggtcgggtctggccccaccgggagccttttgatgcctttggcagtttgcagggattgcgggagtctgagcattatctggggcaggtattattagcagaggggaaaaaaaaccatacacaaaacgagtggcccgaactgccgcagtagctgagggaatgtgacttgcccaaggtcactgagcagtgtgggagcccaggtgcaggcaggggctctgatctggcacaggaccagtccaggttctgggttagggaggggagaaggatttaggtggttcagggaccatgaatgaggtgctctggggaccagctcggctacccagcctgaggtgctcctggaggaagccgagcagtgctgctagagctccggccgcctgtacatggaggaggcctgcacacccctctgccatcccagctccagcccaagcttcctttgccctcccagcagctttgccttccctcagtctccttggctgtcttggacatcatagcgtgtgggcactctggaggggacaaatggccacatctgagtgttctggaatctttccctccatcaaaccccttgcattttgactctgtttgcctgtcccaaagtcttcccatgaccccccacccccaccccacttaatgcacacccacttcttagcacttaatgcatacatcccatcctgggcacttagttcccaccctgaggctatttaaagttgctttcagtcctcttacccacttttcgaagctcccagcacagctccatggcctacccccccgcccgcagttcactgctgtagccacactggctgtgccctctgcttagtaatgcactgttgagccccgctggctggggtctgccaaccgttcaccagtcttgtccaacgacagtctgtggtctccttcaccagtgccaggtgccccactggccagacaggccctgccattcacctgccccccacccccagggccaccagctggtgatggtgtgcccgactgacagctgcctcctgtctcctgtggggtgacacatggcaatcggacaggaatgggcttgggtaggacaaacccaggaacagggtaagagggggtctttctggaagcctagagctctgtctaccagtggtgggtgggagtatggtggtatccaggaatgacaaaatcagggatggtggtggttctggagccatttctctatgaggcatagatgggggttttagttttgagtcaggacagctgtggggactggaataggtatggaaagttctttattttctgctgcttggatccccaagttctagagaaagattaaagcagggaactctgagaggggcccagcctgcactgatcagggagattgctgcctctgcagcttgatgaaagtctggcacagcgtagctcaggccagggagagagatgggctatcatgtacctgctgggtgtccttgagctccacacttgtctttgacccttagagcctgccagagcaagaaaggctgtagggattgtcccccaagggctgtcactgacacatgggccagtcaaggatgtgcatgtgtggtcctgatcttcctgtaagcaggaactgtaagggagtagattgcaggtgagggctggggcttagcaggaggttggcatgcgtttgtaagctgtgcacccctcttccattttatcagtggttggaggagctaaagaaggcttggaaccccaaggtcagaggtgaaccagcctgtccatggggaaacagaacccatatccccagtctcaacctgcccggctggttctgccctccctcgcttttgtccagtgaaacaacgggatgttattgttgacttggtggctgctggggagccattctggggctgctccccagggcaggaggttgttgttacctcctccaggggatgaggtcacatctggggcttcccaagcatcagcatttccagtggaaatccttgcccccttggggacttagatgtgttcatcaccttcaaggtgaactccctccacagagtctcatggtgggggggcaattccccggaggagagggggagtttcctaagccaagagagatgcttggtgaggtcaccaggagcttcctaccaagctctgtgacccctctgtcctggacagtgaagattctgagagcaggtccggtggaatggacgctggcacaggtccaatgatgaccatggtataggggagagagctgggaggtcgggagcctggttcaggctgtgacctaatttgctctgtgactgggcaagtctttgccttttactgaaccccagtttccccaaatgcccaaagagggtaggggagggggctcatccttttctgagatttaatgtcttaggatttctctctctctgggatgggaggggctgggcagagtctgtggtggcctgtttaaatcttagatttcgagaaatctggaggagaaattgaaacctgggaagtcaggggaaacccttaagttcgcgttctttcctatctttttctctcgtgggccaaaggctgaggatcatttggaggaaatggatcatcagcatgtgccctcaagggtggacatattcattcagcaaacatttgccggggccacccttgtgctggtcttggggatgagcttggggatctggtgatgaggaacaagatgattccgtgcccttgtagacttctcagtgtagatgtagatgggcagataaacctgcaggtacaacagaatgtgtaacagagagcagttatgggcactgaggagatgcctaacccaattttcccaatcagggagggcttcctggaagagggagcaagctgaaatggcaggaggaggagccagctgggggagggaaggaacaggaggaagcaccccacttagtaggattttaaacccaagaacttacagctaggaccacagagaggagagaagccatgtgaggggcccccatgtgaagaggcgttgagtcagcctgggcctgggggctcccgaaaagtttgaaacttgtccagatgggcataggtgaggggatacctgtcatcctatgactggcgcagcagtgaggaggaaggacgcacccactggagaagggccgtggcaggcagggaaggcctctcgagtgctggcaaggccatagccccgtcacagttccctggtgggaggctgggtctgggtccagggagaccatggctttccccattgactcctgaccgcaggacagtctccaggtgagaaggtctgtccctcagctctgtcttctcctgctcttcctctgcagagatggaaggagcatggaggtggcagggtgggggtggcatggataggtcactatctgggctgagggtggcgccctgggggaagcagggaaagctgggctctgttttttgaggagggccaagcaaggtgggatgtgaagctcagcccagggggcaggtctggcagccctcagggggcagtagctggagtagatgggccactagctgatagcctgtccacccccagcttcacacggctctgtcacaagagactgactgcacttcccctgctttggtcggcagctctggactgaaaagtttccacttctcttgatttccttttttggcccagcgtggctgccccaggagccttccttcgccatggttgggggaggaaggggcccttaacctgtcctgccttcagaagagccagggttccgtacccttgcagggagggccagccaccaggtgtatggccagctgtcctgtcctcagggaaccaggcaggccagaaagaaagcagggggatggagggccacggcaccttgttgggccctgcctcctcagaggacagagttcccccttccctagccagccaggccttgagggactgtcccctctctgccccgaatggtatggggtggctctccaagccctttattctccctggccctggccttgccatctctccagatctgtgcccagcctcccggaggacctctgtccctatgctgcaccccatccagaacacatggcacacagctgccgccttccccaggccctgcatggtggcctggccccactgcctcctagactcccacagttcttccctcactgctccctggctccgcctcctctctgcaccccactcaccctcctcctcctttctgcccagaaaggaggctgctggttctttctcagttcctctgaggaaccttcttggatgaccccaacccacacagcctgacagcgcgagcttaggatgtcagaaaagaaatgtcagagattagctgggccagccaaacattccacagatggggaaactgaggctcagagatgacagggactggcccgagatcacccaaagaggcagagctgggaccggggctgagtcgtctgagcctgcttctgccccagctctcagcctgtttccagctttctgtctgccatcatactctgtcccaggctgggggccccttcagtgcctttcctcctctgctagcccagttgggcccagactcttcccgccccagtgctgtctgttcccaggagccacaccagctgtgagtgtcctctcttcaggaccttggatttggaccagctccatatacctcttctggtctttcctcaggtgggttgggcctcaggtcccaaggacaggttgatctgtgtcccggctcgggctaatcaggttttaactgtcatgacagcctgggattatgctgatcctgccatgccttctgcaccccatgcttccagccagaggcttgggctctgtgccagcacccctgggtgacccctcatcatggagggcagccagcctaggtctgtgttcggctcctctgggggagaggcaggaagagaagccctgggtttgcccttggggagcccccacattcctggagaggtgagtcttctgcctgtgaagtagggcggacccctggggaggtcaggaatgacctgcagatgtagcctaggactgtgacaggaggtgagagcaggaaaggtcagtgtgggatggtgcaatcaaggaaggcttcctgggggaggaggaggagccaggctagagctaggggcaggagcatagggtgggggcagagtgcagcatagacagctattcatattgttgtttgtacagagtctcacgcctgtaatcccagcactttgggaggccaaggtaggcagatcagttgaggtcaggagttcgagaccagcctggccaacatggtgaaaccccgtctttactaaaaatacaaaaaaattagctgggtgtggtggcacacgcctgtaatcccagctacttgggaggctgaggcaggagctctggcccagcctgtcgaggaaggaaggtcactgtgatgacttctgcactccattggtggcccaggaatctgttctaagatacctgtccctctggcatgggagtttggcctgccccagtcttgcttctctccactgtctgagctgctccctgggaatggaagacttggagcaagaggaagcctggtcctcaccttcagggccccataggccagatgaaatcccatcagacagcatgatctgagcgaagatggtggtgccagatggtttgtggtacaaggtcgaaggtacgggcagtgagggctggagcagtctggaatacttcctggatccaagggatttagctacattttcaaggacaggtaagatccatgtgcacagagaaaaggaggaaggtcaatccagggaggggagaacaggagcaaagtgcagagatggaaatgagccatggcagagctgtgcagagatgaggtgggccttgactgccctgccctgaggttttgggccctgcttggatgggcagttaggagccatggtgggtccttgagctgaggagtggaggtgagtgttttcgccagggctggctgagtggggacctggctggtgagcacactctgcccttcactgtggtcagcttcagagcatgcagtactttttttcttagagacaggatctcactgtctcccaggctggagtacagtggtgcattcatagctctctgcagcctctaactcctgaacacatgtgatccttctgccttggtctcccgaagtgctgggataacaggcatgagccatggcacccggccccacagagtactttatgttctgagcgagatcttgggagacttgtctttctaatcagtcactcaggaccggggccccacgctgcacctcgagaagattcctgccccactgttgtaacttaggatctttaagatggagagcacctcttccatgattaagagagaggcaggtggaaataaagattttgttactaacaggtcttgagggatacctggtgtacctgaagccacacacaggtggaggtcagggagcatgtgcagggtggggggatctatgggccagcatctttatggggtccatggtgttattaaaacaagttttccacagggagtttgttttgttgttgttgttgttttgagatggagtcttgctctgtcacccaggctggagtgcagtggcgtggtctcagctcactataacctctgcctcctgggttcaagcgattcttctgtctcagcctcccaagtagctgggagtacaggcgcacaccaccatgtctggctaatttttttgtatttttggtagagatggggtttcaccatgttggccaggctagtctcgaactcctgacctcaaatgatctgcccacctcagcctcccaaagcgccgggattatgggcatgacccactgtgcctggcctccatggggagttttaattggtgggtttacagcaagcagtcatgagttccaggaggtcatgttgtgacttgagacaaggtcactggcctatctgcacagtccatgcgggctgtgggacaaggtcagcaggaccaatcaagtgggctgtatgtagccatcccacagggaagcagtcaccaggagacgactgtctacggtagatatctggattgagcacatggaggaactgggaggaggtggggagctggaaacggtgtcaaggttgactgagccctgcttctagtgtgagaaaacccagcttatattcaaaacggatgccagggcaacatcaaagcataggaattcactacattcacctgggcctgcacacctgtgctcacttgcacacactgtcttcagggtgttacgggcagaggtcaggacttcattagccaagtagcctctaactgggcctcaccctcggtaggctttggtctcctcatctgtctgggaagggctgaccttggaagcctccaagggctcatctctggaatacgatgttataagcacagattctggagtcagcttgcctgagtatgaacctctgctccaccccttactagctgtgtaatgctgggtaagttactcagcttctctgtgtctcatggtcctcatctgcaaaatggggataataaaagaacctacttcatgagagttcagtgatgattaaatgagttaatatatctaaaaatcatttggaatagtgtttggcacgtagtaaatgcgatggaagggttgggtggtaggggcatcatcatcgtcgtcatcatcttcctcctcctcctctggcatctctggtttctgatggaatgcagccctggcagcccagcccctgccagttctccctaatgggctttgctggctggctgcccttgctcagtctcccctgctggttcaggctaaggctaagactggggaaccttctgtttctcagcagtcttccacctgcctccctccctccacttggggttgtgtagccattctccgccctctccccgacccctgccctggctgtgggcccaagggcaggccctgcaccgctaccctttgtctgctttgaaggagccaccagcgacttcggccccactctggggcttttggaacctgctgggctggagaacagctggaaggtagatgggacatgatgtttgtcctgggcttccggccttccctgggcgtgggctcagggcatcttacccactccagctgggcctcagtgccagccttccttccctgagtccctgaatcctgctcagcacagcctctcaccaaggggcttgctttccacactgtcccttctccctaggactttgccccagacagtctccccaatagccaaaccttcttctggtcctttgagcacagtggtgccatggggagagcatccagaccttggtggcttggaagggcattagttttcctgtttgtaaaacggcaatacaggttgtcctgccttctttgcagggtggctggaggtttggtgggctggtcagtggaagcagatgagaatgtcagtttcttctgctgcctccacttccagaaaactgtctgacttctctggcactcagagagtcacactttcccaaaaagacccatggacttcaccctgattgttttgtgatttgtttcaagaatcctggtgggtcataaaacccaggcccaaacaagtaccagcacccaccctgactcgcacccagctaatccacagggaggaaaatgaacccaggaaggcccagccccaatcaccgtcacagccagccagctgtccagccaccaaagagataatgaggcttcttggagccagggctgagccacacatgagatatactcccctcccacccacagctgaccttggtgggtgggaggatgctcccctttggcccagcacacagctcgctcttctcatagctcataaacaagttagacttctcagtcctccatgagctgagtgctgtctcgaggccccaccacctgccccagcacacaggctctgcccctgccaggcgactagctaatctagaacctaaccctgcctgagagttgccaggacccacctgcaaccatgacctatccttagcaccgagccggtgccaccctggaaaccaggcttctcacaccttcttcctggccatatcaggagagacagaaacatttgttcctgtattcccacccctagtggaagggtttcctctaccactctgacatgcacggcacctacacttccaccattagtcactcctttggatttaaggctttgatcactaaaggcccctaggagatcagggcctcacctggaaggtgggtgggcgggtgattccctttagttatcaggttagtgactcggcacctagtgagcaagagagggaagggtagagtagggatgattcagggaagtagggagaggctgaatatacagctttttgcaaatcagaggctctccaggaagcccaggatgtgatcctggagagaagcagctgggtaatgggtactggaaacttggagcttccctcgctctgtgtccttgggccggtggtacagcctctctggcctctgtgtccttcagttcaatgactgtttagatcctctcccttccaccttgacatgtggatgtgggattccaaagggtggagaggctgcaggctaattcctaggcatcacgtgggccttccctctactctcttttccagacacgtagttgggcgagggtgtgaggtaggcctggcagtgcaggggtgggggcacaactgtgggaggacgctcctgccagatgtgctggctctccaacctgaggtcggcctgctttctgctctttggcccggggcctctctgactgcctgacttaggcattctctgtgggggtgcccacattcctgccattttcagagcctgactctctgcccactttcaaaaggctccttgaggttacattcaaggcccactgggtcagtgggtcaggttgcaaggctggctttgccagaccagagcatgggacccagccccttcatggacaacaacacctcccactctgccctcccctggagctgcactcctctttcacaaacaacaagagtatggggacagcgggccagacggtgacagcaccagagtgaatgagaagaggaaacgtgctccaccaggcaggcctgagttaggaaatgcatgccagaggcccagacttgccacagtcggtcagctgctggggtggtgatcgagggtagggtccctaaggagtcaggccccattctttccaatgggatcagagccctgtgagcacccggccctgcggctgtgtctggtggaggttatctcctacaacccagccatccttgcagccctcctatctggccggagctgggccttgctggccctgccaccatgagaaatggtactcaggggaactatggagtccggctgggtacggggcagcctgaatgtgctttcttggtccagcacgagtgaggattggctcggaatcacatggggcgggaggtgggttgtcttgttcctggcctgcctctgggctatgccctccccatatgtccctagccccctcccctacctgagcccctggttattctgggagcttttagctaccacttagccactaatgcgtcaggctggggagtgagggggggacacggtgccagacggtgctccttttagacaagcaggatgggaagcagggggagccaggaggtgggggacgccagaggatggggaggcattttccactcctggccctgctcgtaggttcaggcagcaggggagagtggtgggcagtgggtcagtgtgtccttggacaggctgcatcttccctcccccatcacacgtgggcctcagctcaccttcccgattcttctcattaggactctgccaggctgcagcgcatggcctctgtcctccatacagccaccttccccacctttgctcaggttgcgtcctctgcctggctttccctcccggcctgttcagggcccatccagcttttatctacctcacctctccgtttgggttcataaagcatcacaaagaaaatgttcagggatatgatacatactcccttggcctggcctttttaggggtagcccctggccttgctcagcccctgcctgggcagagactcgaggcctggccctgatggcttggtgctgccttcacttccaggcagccctcctgccccttagcccccagcccccgctcctgccaacctgaacaaagcttcctttcatgtattcatcgagctgctgctgctcgacacttcccgggcacaatcaggccttttgagggcctcaggcggtgcgggagcccaggctggggctggggtggagaatgggccaaggccttgtcctggggctgagctggtgtcattccctctagtccatacgcatcaccaagaacagaggtgggagggccaggaacctgggggtcatgggaggccgtggtcctgggctcctgttcgttttcctgcaaaatgggacgaacagtccctgcttcctccaccctagccattgtggctagggtttgaagggaactgggctcaggcttgcagatccgcatgggattgtccgggccctagtgctgcagctcctacccaggggccagcagccctcaccctcccttcatgtcttcagcagatactttgtgggcagccctggggtccatgctaagacagttttgctggagagctgtggaagttttctgtggtgtggctgtctgacccctcagatgtattcccagggtagggccagacctccccctcagaccttgctctccaggacccagtcatgtctctgccatcaggctcgactccccagggcaggactgttttcctcttctcttcaacagccctgcaattcctagaccagggtgcccccacccagagtcctgtctggtgcctcttttcccttgagtagttgtacattggccttgccggccccctcggagacctgggcctgtggccttggtgcaggagtggggctaaggtgactgatgaaggtggctagcacagtctgacggctagaacttttctgctttgactcccagggactatggatctcaggtcctagcccagcatctctagatgcagacacgcaccttttcctggctgccagtctggctatcggtggatgggaggggagcaggaggggagttggggcggcagactgtctggatctctggctgggccacagaggatggtggctgcagtttgggctgcgggtggaaggggagttacgggagctgagtcaggaagactgtgtctgtgaccccagcactctaattttatcccaggaagggagggggagcagggcagcacccaagacctgccagctctccctccctcccaccgaagtgccagtacctctcagcccttgctctgcacatctcgggcctacagggagggaggcttgggggccagggagggctgatatccccggagctgttcagttgggctgtttgtgatgtgcaccaggagagccacaccacccaaggacagtgagctcagcacttctctctgtagcctgccatgctgctgagaactgatactgcagcctgggacaagctaatgtgtcctgcctgctggtgtgaccttggcatgtctcccagggtacctcagcattcttctctgcacagtgcgccaggccacagaagaggtgaagaatgctcacttccgggggtgacctggccatgaagggatgtttcttaaagaatgaaggtgtggtggcacagtgtgtggtccagctgctccttgcccctgttaaatgcagaatcaatagggatggctccaatgggaataagagggatcgggggcagagttgaggaaatggtagttctttttggtcagagctggagcttgggtgtcactgccaagctggctgccccagagtttcctgcagctgaaaaaacagtggtcagacccagttcctaggtgaggcccaggctggtcagaggtgggaagatgctgggtgtggctgattgctgggggcacaaccacaggccatcccatccctataatttactcctgcaaccaggacaacctcagcagtgtcactggagatgagacacctccccagaggcagtggctgcagtcagtttcttttttggggaaaattttcccggtcagcccttctgctgaaagtcccaggctgtgctctgtgaaggttcccctgtcccagagttgctggggaggaagagccgatcttcaccccccggagagctagcatcctcatgggtgaaaccaggccagagtgggccatggaatagagtccagcttggtaggcaggagtgcaggctctggttcagggtctgctactgacctgcttccgtgtgcccttgggctgcccctcccttggcctctgttttcccatctgtgaaatgggacggagtagatgttgagattcctttcctcctctagtctagtgctcactaaggggctggggatgggccaggagaggttggagagggattcctgaaggaggagaaggggttctgagcattgtgattcctgggaacctggactccaaggggggtgcttgaaggccctgctgcctgctgaaaggcccggggttggggggcgctgcttgctttggcttagggcagcagagaacctcccagagcatggccaaggagccctggtcctcctgccttagcccagccctcaaaagtgtgtgccagaggagggggtctgttcccccaagaggtccctaaatccttccccactctgagatcacacatactgtgaaggaaggagaggctgccacactaggggaggggccgtgctgtgggtgaggacagctggttgctggagcccaccggaggatctcttacttctcctgtccttgactctctgagtctgggtaccaccccagcccagagcttgtctgacgccctgccaggaccctgagcaccaagcactggttccagtgtgccatgtggaggggacccagagtcttctctctcgggacctggcttcaatgtttctactaattgtctcctcctcaggccatgtagggcaggaccgggtggactttggccagactgagccgcacacggtgcttttccacgagccaggcagctcctctgtgtgggtgggaggacgtggcaaggtctacctctttgacttccccgagggcaagaacgcatctgtgcgcacggtgagcctctctcttcccccaacaccccccctaccctcttatctcccctctggccctgccaagggtcctcagggaatccgagggagctggcttctcttcctaaactgcccccacctccgtatcctataaatggctcctgggggaggctccctaaaggtagtccagattggagtggggagctggggcggtgtggagaaaaacaggagctaatgggcctggccagctgggcagcgctgctgcggaaagcccaggctggaagctgggccccagagcccatgcctggtcttctgaaccctctgggcctcagctctggatatgagaccctgtttgacctcaggtagatcactcaccctctcagagccccagttgctcatctgtcagatgagaataatggttgcttcctttggggcttatcctgaggctgtgtggaaagcatttcaggggtacctcacccctggcagattgaactaatgcttctccccttcccccaggtgaatatcggctccacaaaggggtcctgtctggataagcgggtgagtgggggagggagtatggaggggtctgagccacttggtaaagggagaggagaccctgagggtctaaggaaggaagcatggccctgccccacgagtcccagactgatggggagacgtggtcctctgtgcttaggggatggcgtcagctgcacacactctgggctgtcccgggaggctgtcacctatgctaagcccttctgacaccttcttccctgatcctgggggtcctagtgctaggcttgccagggccttccagcaaccaatttctctcctcccttctctcttccccgggcaggactgcgagaactacatcactctcctggagaggcggagtgaggggctgctggcctgtggcaccaacgcccggcaccccagctgctggaacctggtgagaaggctgctccccatgtgcctgatcagctcaccttctactgcgtgggcttctgcccctcatggtgggaaggagatggcgagactccaatgctggccttgccctgggaggatggggctcctggccgagaaactggccgtcatgggaggcagtggctgtgggattatgtggccatccaaccctctggatctcccacaggtgaatggcactgtggtgccacttggcgagatgagaggctacgcccccttcagcccggacgagaactccctggttctgtttgaaggtagggcagtgctggagcaggcgccccagggggatgcttctgaactgggctgggagaggagtggtcagctctttgtccagtgtccggaggagggacttccaggagctgcctgcccttactcatttctccctcccactgaccccaggggacgaggtgtattccaccatccggaagcaggaatacaatgggaagatccctcggttccgccgcatccggggcgagagtgagctgtacaccagtgatactgtcatgcagagtgagtcaggctccggctgggctgagggtgggcaagggggtgtgagcacttaaggtggcagatgggatcctgatgtttctgggagggctccctgagggccgctggggccatgcaggaaagcaggaccttggtataggcctgagaagttagggttggctgggagcagaggaacagacaaggtatagcagtgggatgggcccagccctcttcaggaacacaaacagagggagccccagacccagtgcagggtccccaggagccaaagtttatcctctgctgagttcacgtggaggcagcccccaactccctcctcatcagggctctgccaattgagcagaagtgacataggggcccccagggaccttcccccagtccccaggcatgaagtcattgctcctgggccgatgacatctttgtaggaagagggcaaaacaggtgtggggtggaggtgcagggtctagggcccctcggggagttggacctgatgttctgagtcctattccagatctgatttgccatggtttgtgcagacccgaaggagggaggagagtgtgcagggttgggatggtctcccgggcaagcttcccagccttacgcccactcgcctctgtccctggcagacccacagttcatcaaagccaccatcgtgcaccaagaccaggcttacgatgacaagatctactacttcttccgagaggacaatcctgacaagaatcctgaggctcctctcaatgtgtcccgtgtggcccagttgtgcagggtgagcaggggcgtgagggctgctggctacgtgtctgtgcatgaataggcctgagtgagggtgagttctgtgtgtccgtgtgcatgtagaagttgtgtggatgtatgagtgggtctgtgtcagggactgtgggagcagctgtgtgtgcatggagcatcatgtgtctgtgtgtgggtaaaggtggctgagctcctgtgcacgtatgatggcgtgtgagcgtgtgtatgatggggtgtgtgtgtgtgtgtgtgtgtgttttgcctgtgtgaatgtgctgtgccacgtgtgtgggtgtgtgagtcagtaaatgtgtgtctgagtccgtctgctctgtggggacctggcactctcacctgccctgaccctgggcactgctggccctgggctctggatcagccaggcctgcttgctggagtctcatctggagacctgccctgagtcctggggcacccccggcaggtcctggcccctcacagcctgccttcctcctctgggcccaggtgttgatattgctggcagtggtttcctggggtgtgtggggaagcccgggcaggtgctgaggggcctcttctcccctctacccttccagggggaccagggtggggaaagttcactgtcagtctccaagtggaacacttttctgaaagccatgctggtatgcagtgatgctgccaccaacaagaacttcaacaggctgcaagacgtcttcctgctccctgaccccagcggccagtggagggacaccagggtctatggtgttttctccaacccctggtgagtggcccttgtcctggggccggggctggcattggttcagtgtccagtagggacaggaggccttgggccctgctgagggcctccctggtgtggcaggagcaggggctgcaggctcaagaggctgggctgttgctgggtgtggggtggggggacagccagtgcgatgtatgtactgttgtgtgagtgagtctgcactcatgggtgtgtgtgcatgccctatatgcacactcatgactgcacttgtgcctgtgtgtcccaccacctgcttgtgccgagagtggacactgggcccaggaggaagctgctgaagcatctctcggggagctgggtgctattacacctgctcaggcactgcctgagcccgataattcacacttcttaatcactctcattgattgaacacacggcaggcggaagtgttgggtgtgtgtggggagagttagggatagagtggaggaagccaagaccctgctctgtggctcctgggtgagtggggtcccccaggctgggaaggggttgggggtctggcctcctggggcatcagcaccccacagcctgtgcccagggagggctagagaactgctcagcctatgatggggttcctcctgccttggggttgggtagagcagatggcctctagactcagtgattctgtaacaggatacaagtttgtggttttaaattgcagcacaaagaaattaggctgaactcctctccttcctcctctccatccctccccattttcagtggtggttggcaactcagtgccaggcacaaggctggcctgggtgagtggaggtggatgggtgggttctgggccccccattgagctggtctccatgtcactgcaggaactactcagccgtctgtgtgtattccctcggtgacattgacaaggtcttccgtacctcctcactcaagggctaccactcaagccttcccaacccgcggcctggcaaggtgagcgtgacaccagccgtggcccaggcccagccctccttctgcctcacctcccaccaccccactgacctgggcctgctctccttgcccagtgcctcccagaccagcagccgatacccacagagaccttccaggtggctgaccgtcacccagaggtggcgcagagggtggagcccatggggcctctgaagacgccattgttccactctaaataccactaccagaaagtggccgtccaccgcatgcaagccagccacggggagacctttcatgtgctttacctaactacaggtgagaggctaccccgggaccctcagtttgctttgtaaaaacgggcatgaaaggtgtaaggaataatgtagttaacatctggttggatctttacatgtggaaggaataattgagtgactggagttgtcaggggttaatgtgtgtgggtgtggaagagtcaggcagggagagcttcctggaggaggtaggggcaagagggaaagggggatgggagaaaagcaagcactgggatttggaggcggaaatctggagagtctgagcaaagccaggtgcacctttggtccagatgtctgactcagggaagaagatggtaggaagagacgtggcaaatgaggaggaggggcctgaaccacagggatactggcctctgccaggcagaatgagggagtcaggccctgcgcctgtctttgggattgtgcaggtgagaggaaacatttgaggagttgatggggcacaaattaggtatgaggaaggagttccagggggcagaacctttgccatctcacagaggacaggggcagcttctcttcttccctggagtaggccctgctgggggaagctgggtggaatgccgtgggagatgctcctgctttctggaaagccacaggacacggaggagccagtcctgagttgggtttgtcgcagcttcccatgccagctgccttccttgagactggaaagggcctctagcacccctggggccattcaattcaggcccaggcgcccaacctcagttgttcacattccccatgtgatctcctgttgctgcttcaccttggaactgtctcggctttggtgaccttgtaggaaactggaaccccagcaccattgtttggctcctggaagccttggggagaggaatttcccacagggcagggcctgggtcctgattccctgcctctttactccctattcatcccggctacacccttgggcccccatccttgcttggctccagtagtggctggcacagctgttgtggtcagccagggatggcagggcactggggagcagaagaggagaggtcacacagtgcggaactgggagcaggagctaggacaaggaaggctggacttgggccatggattcccttcctgcagacttgggaggtgagcacacttgagtgattagagaaggtgtcttcgttctaagggcagtggaggaggcaccattttggagcctgcatcattcgtatttgggctagactgaaaaatagagctttctaagtcctctgcagagaatgggaggctctcacaactgggagaagtattggctcttttcctgagaattttgccaagggtatgctgttactggggctggtttggaaggaggtatagggcagtatgtctgtgaaggcagtggctggggtggggccttatcaggcccaaggagcatctggccacatctcagagtccacagatgaggatcacggatgtgtagaggaaacatcctaggcaggcaatcatctgactgcttttttggggcaggtgatgccctgggaaattgggagggagggagagagggaggtaggctattctagaaactgggagagcaggtgaggtaggattgggaggaccaggggtcagggtgcccattggtccctaattgtgaacggagagagcattggtctaggaggcaggcagctcggttataagaccttgggaactcttgatttagaatccaagatcctttttagatctaagattttataaaattaagatatcccctaagatcaaatgcaacgtggagtcctgaattggatcctagaacagaagaaggacatttgtggaaaaactagtgaaatccaaataaagtctgtagttttgttaatagtaatgcaccaatgtcagttgcctagttgtgacaaatataccgtggttatgtaagatggtaacattagggggaactggagaagggtagattggagctctctgtactatctttgcaacttttctgggaatctaaaattactccaaaataaaaaaaaaatgtatttaaagtaaatatattccctaagagtccaggaggcaggggagttgtagaagcagctgagtggttgggctctgacagatttgggttccaactcggtctctgctgctcaccagctgtgtgaccttgagcaagtggcttagcctttctgagcctgatttccttatctgtggagtggggaagatgacagccacctcgcagggctgtggagggttaaacgaggtgatgcatggacagcagccgcactgaccttgctggtgtggggctcctgcttctgttcttcccgtgcagccttgggaatgttggaggccgtatccagggacccctgggcctcctgggatggcctctctggatcagccttggaaggttccaggctgcccttaggctcccacattcttccccagtcacgctctcctcgccctgcccacaccagtcctgtgacccttgcctgagttgtgacttcccacccctccccggcctagaggaaagctgcctggcccctcagtgggactcccgcccactgaccctctgtccaccatacacagacaggggcactatccacaaggtggtggaaccgggggagcaggagcacagcttcgccttcaacatcatggagatccagcccttccgccgcgcggctgccatccagaccatgtcgctggatgctgagcgggtgagccttcccccactgcgtcccatgggctatgcagtgactgcagctgaggacagggctcctttgcatgtgatttgtgtgttcttttaagagcttctaggccttagggcctggacatttaggactgagtgtggggtggggcccgggcctgacccaatcctgctgtccttccagaggaagctgtatgtgagctcccagtgggaggtgagccaggtgcccctggacctgtgtgaggtctatggcgggggctgccacggttgcctcatgtcccgagacccctactgcggctgggaccaaggccgctgcatctccatctacagctccgaacggtacgttggccgggatccctcgtccctgggagaaggtgggcatgggagagggggaggtgttgtcgggctggaggaggtggcggtactgggcctttcttgtgggaccctcctctctgctggaactgcactggggtaaggataggagggtcaggtctgcagccttgtatctgctgatcctctttcgtccttcccactccaggtcagtgctgcaatccattaatccagccgagccacacaaggagtgtcccaaccccaaaccaggtacctgatctggccctgctggcggctgtggcccaatgagtggggtactgccctgccctgattgtcctggtctgagggagacatggccttgtcctgtgggccccaggtacatggggcaggatacagtcctgcagagggagccctcttggtgggatgagcgagacgggagaaaaaaggaggacgctgagggctgggttccccacgttcattcagaagccttgtcctgggatcccagtccgtggggaggacacatcctcccctgggagctctttgtccctcctcacggctgcttccccactgcctccccagacaaggccccactgcagaaggtttccctggccccaaactctcgctactacctgagctgccccatggaatcccgccacgccacctactcatggcgccacaaggagaacgtggagcagagctgcgaacctggtcaccagagccccaactgcatcctgttcatcgagaacctcacggcgcagcagtacggccactacttctgcgaggcccaggagggctcctacttccgcgaggctcagcactggcagctgctgcccgaggacggcatcatggccgagcacctgctgggtcatgcctgtgccctggccgcctccctctggctgggggtgctgcccacactcactcttggcttgctggtccactagggcctcccgaggctgggcatgcctcaggcttctgcagcccagggcactagaacgtctcacactcagagccggctggcccgggagctccttgcctgccacttcttccaggggacagaataacccagtggaggatgccaggcctggagacgtccagccgcaggcggctgctgggccccaggtggcgcacggatggtgaggggctgagaatgagggcaccgactgtgaagctggggcatcgatgacccaagactttatcttctggaaaatatttttcagactcctcaaacttgactaaatgcagcgatgctcccagcccaagagcccatgggtcggggagtgggtttggataggagagctgggactccatctcgaccctggggctgaggcctgagtccttctggactcttggtacccacattgcctccttcccctccctctctcatggctgggtggctggtgttcctgaagacccagggctaccctctgtccagccctgtcctctgcagctccctctctggtcctgggtcccacaggacagccgccttgcatgtttattgaaggatgtttgctttccggacggaaggacggaaaaagctctatttttatgttaggcttatttcatgtatagctacttccgactgcatctgtatgaaaataccaaaactacatgcgggggggtgggtgggaaagggaggggctgggaagggatgggttggggagcgggggtgatcccagtctgaggctcccggggatgagataagagtctggagacgggcatgggttcttggagagtggcatgagctggctctgccctgggagcccggtctgagggggacgttgttggagcccctagtgttgggggtggttatgggagggggtggggtgagggaaacgggagaatgaaggagaaaactgagccctagtttcaccgtgttcatttggaaggacgagccgggtcctcagggggaggttccagggactctgcccttggcgttgagggttggggggcggggggcctcctcccttcctctcagcccccttccccaggggctgtgcttccatgctcctagcctcccaccttcgctcaggacatgttataacttaggctaaactgtgaaaattccggtggggatggcctgggccgagctctccaggcaggcggccctgcccccagccctgtccatccatttcaggggggagctgggcccttctccggctgtgtctggccacccagggcagtggctggggccagtggccttccagctttggcccctgcacctcttctcaatgcactttaataatgtaacatattactaataaacaagctatttatttacctgcgcctgttccttgcctgcaaagctgtcctggtcagggggtgttggtgggggctcctgtttattactcgccaccccctggctgcgtgagcatcacatgcattctttcatgtcctggttagggcccaggagccagctcagcagggctgtagctagtgagaggcaggaatggggacctgaacccacgactcctcagcagcgtgctgcttgctcgagccttgaccccagagccccaatagcacgtgcaccccttttccccattcccagccttcacctcccaccacttccccctggaaggcctggcctgggtcatgctagaaacagcctcaggactccctgccttcaaggggcagttctggagggcaagctgatcaaatgcgaccctgtgggatgctgtggccttgagtgtgtgtgcaggaggctggtgccggctgaagagatgtgggaatgggatttgctccaggcagggtaggggtctgggtgagggttggagagtagggagggacctgtggggagggtttatgagtgatgaggtaggatttgagttgtagaaactcaggactccctccaagatcaagtaaataggttttagaacacagaagtttatgcaggaaggagcctctgaggctggggtggaaggatgcaggggagttagttaggaggctgtctggtggcgggtggaggtcaggatgagagcagtggtcctgggatgaagggcagggacagtagggagcactgcagatagaagtccagatagaagcccagaggcctcccctcccccttgttcccttctctgtcccctgtccctggaggcaaggacctaggcctttggggtctgctaggcgtttttcctgagcagtgactgctggaggggtccatggcagacttggggcagtttacttctctgtccgagcccagcttctggttggctctggcaaaccccacaggactggaattgcccccacccatagtgctccctcccacttcagtttgctctgcactctcatagccagcccattcctgaggattctccccatccttttctcccccaacactcggcatgccctgggggaccaaggtctcagcaggtacatgggaccaggggtctttgggagtttgggggacccagaagagccctgggcagctggggcagagacctggggctgctgccaccatttttggcgtttgtggtcctgggcagaccctcgcctttcccgagcctcatttctctcctgtgtaaaaggcagggctggacctgggcttctgtggaccctttcctgcacatctcgtctgtcccagtccgtctgtattccagtgcacagccaagcatcggcatcaggatgggggtttcacaggctcctgctcagcaagctggaggctggtggcaaagcaaaggatgggagtgaattccagccccaaatggtctgagcggcgagtggacaaagtgtgggcttaagccttggtccctcctggagtgctgctggtggtctccactgagttccctgtcctctctgggcctcagcagcctccctctttccagagatgctcctggtgctctgatgggtccatggcaggggatttgagtgatggaacccactccattgtctctgtggaggcaccaggagaggctgggctgggagggaagccgtgtgcattaaggcatgaaatgagcccgtgtaaattccatgtaaatgagctggcagggatgaggccagccaggcacaagcctcctgccctgttttccccaatggacaagcagcacagcaggcctctagctggcggtgtgtgggcaggacggttaggctgggcccgggtggtgggaggatctgctctagccataaccacacgatatccacagtcccagcactggcttcttgagggccaggccagggaccagagccaggccaggggcaggaaccaggcccatccttctcccctctcttgtgcattctcgttggggaggaggaagagggacgagactgaaagctcagctctcctggggaaggcagcagggaactgcagatttcgttctgcctccctcccactttaggaatgtagagtcattacggtttatcccccatccacatgtcctgtcatcctctctccccgagggaaggctgctgtcctcttgtctctctgctacatcaaatcatacccttcccatctctcctcagacttctaccttcctttgctggaaccgctctgcatttgctcctgtgattccctcccctggaatgccaggaggaagatgctcccaggcaaagatttcagaatgacatggaattctccagaggaatcctggatcccccctacactaatgcctcagcctgttcactcctgatctttgggagggtgcacctggaagcaagctctggggtccctgggggagaaggcacagcccctgccctggagacacttaaagcctggtagggaagggctgtgggctggacagtgaccatacgtgtgacggtcctaggtgggaggtgggagctcagaggaggaacctaacccattgagcggagtgctcagggaaggctttgagtagggccttagaggatgtgtagaagttccccaggaggagagtgactgaatggagagggaacagcatttacaaaggcctgggagtgtgagagggcctggggtgttatgggctcgctggagtaaagtgagctccatgaagccagaaatccttggcagttttgttcacagctgtatctctagtacctagaacagtgcctggcacatattaggtgctcaggacattcttactgaatgaatgaataagatgagagaagggagagtatctagaggtgagactggatgactccagcagttcccgatcctgggaactaaagcaagatctttatcctgcagacactagggagcaattgaaggattttgagcaggggtggggtagatgataatgataataatggtgaggataatgggagcctgagatccgtgttttcttacaccccatctcttacaccaaagacccactcctcaccatttccaggtgtttctagctccttaaatggtccaattttagccttctgcttactggaaaagaaagtgcagccatcctggctacagtgccagacaggaggtctgtaggcttgggccagtggaatggggctgaaatggctaaatctggctcggaaacacttttatctcaatattggttaactctgggaggaagagaccttgggagaaaaacaaaaacaaaatccacattctcagggtcaccaatggccatgagtcagcccccaccaagggaaggagcacagaaccacactcgggaggcgctggccctgttagtatgctggggcgtttctgtagggtggtgttcacaccagaaccgctgcactcgaaccaagtcaaggtcccagaactctggcagttctttcaagttgggcaaaataaatgagctcagaagggcttaggtagaggtgaacacgtcctttggggctgagcctatatcatggtggggaaacacatggcttgcagcttgattcagctgtagcctatgcctggagcaggcattgctgatcaattgtggcattcctttcctgagctcatatgagtgattttcttcagaacttgcattctctgggggctactgggcacttgaaatagggctcatctgaattgagatgtgctgtaagtataaacaacacactggattttgaaaacataatatgaaaaaaatgaccttaaatttttacatcgattacactttgaaatgataatattagaggttgggcgtggtggctcacacctgtaatcccagagctttgggaggctgaggtcagtagatcacctgaggtcaggagtttgagaccagcctggctaacatggtgaaaccctgtctctactaaaaatacaaaaattaggtgggcatggtggcgtgtacctgtaatcccagttatttgggaggctgaggcaggagaatcgcctgaacctgggaggcaaaggttgcagtgagctgagattgctccattttactccagcctgggcaacaagaatgaaactctgtctcaaaaaaaaaagaaaaaaagaaatgataatatttcagatataagatatatttggctagataacatacaaaaattaattccacctatttctttaactttttttgttgttgttgttttgttttttagatggagtcttgctctgtagcacagaatgaagtgcagtggcaggaccttggctcaccacaaccttcgcctcccaggttaagcgattctcctacctcagcctcccgagtagctgagattacaggcgcccgccaccacgcccggctaatgtttgtattttcagtagagacggggtttcaccatgttggccaggctggtctccaactcctgacctcaaatgatctgcccgccttggcctcccaaaatgctgggattacaggcgtgagccaccgctcctggtcttctttaacttttatctagtgtggctactggaacattttaaattatgtgtgtggctcatattgtatttctgttggacaacactgttacggaatatctgctctgcgggggcagggaattttgtctttttttgttcacagctaaatttcatagcacctagagtagcacctagcacacagtaggtggtcagtaaattatttgtggaatgaatgaatggatcctcaccagcatttctccttaggagtcaccagcaattgatcagatggaacttatttgctaccccgagcctagcggatgctacaccacagtgctaacaacccccgtttgtgctttctgactttagagcttgtgtcgctctcctgggactctcctgatacccagtggggcaggtgaaagtggactctggtgaatgcactgctccgctgagggtcttctgaaagggaacgtttccgttccttctgatcaggaagcagggcagtgtgcaaatggtatggaaatcacttcttgtgggtgtttgcctatctagggtgctggggatacttccagtccacttcctgaccccagcccttggtccctagagacaaaagaggaagctctggagactttgagctctgggggcagatcgggggaactggggcccccttagtctttccccagcgaatgagggcttgtagcccagagcatcctcatctctcaattcagcaggagcctaaaaatagtctgcagtttcagcctcccccacagccgcccgcgccaagtggggccctgcgcccggcagctcctccacaatccagactgtctgcacaatctgccccagctaccgacccccatctcctcggcgtctgtcccatcctggcccctgagaaccctgagctcagcactccctgctgtgaggcctgctgagggtctgcttcacactctgcctttcctaacagcctgggccctgacccctggaattccagaccccatgttttgtccactctccattctggaggggacgctagccagacacaagtggggtgaaggtgttgcaggtaatgaaaccagcacatgcaaagcatggggtgcgagagagcacaacatgccatggaaggggtgagccggaagggctgggtgcacgggatggagtacgggggccagtcccaagctggaaggcagcaccgcaggtctgttggctcccaccccacgcgtggatgccctggagtagatgatgtcttcgtccagcccacggtggagcaggactgccccttggatcaagtagcctgcagtagctctggtgccacccacaccttgtgtagagcccagaaggaacgcttaggtgccagggcctgtctccctgttttgggtcctccacatcttgtgggaagccctggtgccttccggctctgagcttctggggttcctgcctgcttagcaatacaggaagtctcctcaatgaggtccagcaaggggaatgcctcgaggcaaccagtaccttggtggcagagctggaatgaaaccctccatatcctgatgcccagctgggacccgtccctcccatcaatgtcgggcgaccactgctgaggacacatcctggtcagaacctgagatacggggcttggggacctgccctgcagaagggtttcctggtggcaggagtgagtgtgcaggtgacactgctggcccatgacggttccacattctgagtgagcagggtcccagctgcaggaagtggtggcggcagaagtcacagtcaccttcctctcctgggggccggctttcggggaagccaggggaaatgctgagctcatgggctgttcttcccacagctggtttccaaggccttttcttgtccctgacatctctccacagcctcaccacagccctcagaggcggaatgccatcgtgggcattactgtcccattaggcagagcaggtgcaaggccagcctcttgctctgagctacctgccccttcagagcctggcctagaacctggactcctgcctcttcccacctccacacaacaccctcccccaaggaaacaggggtgggtggaatctagaagcttctcaggtgaggtgaaggtgttgggaaggcattagaacttgaggttttctcacctccaccagcccctcatttcccagcagatgtgagacctccttggtgtgcatgtcagcccgtgataggtcagtctcaggacgtttcccccagcatggggcctgtcagaggagctccccctccccagccaccacaagagcccagtcactgggagcgcccctgcaccctggaaggcatccgagggatccaagcccattcctcagcttgaggaaatggcagcccctgcagagggccctgactggccctgtgagtgtggaggtgggggcgtcctagccctgatacatcctttcctgaactccaccccaatcatgggtataaacacaggcagaacatcaatgaagtgagaggagagttgtctgccttggcagccagcaccagggaagatggaactgtggcttgtctacctgtctggccttctgttgttctctgtctcagtctcattctgtttccctgttggtctctgtttctattctctctctctctgtctctccttgttcctatttctctctctggcttgacctcttatgctcacttacacaaaacaagcatgcatatatacaacaggtgggcacatgggaccacacgtatgacctgctcacccatacacacgtacaaacatgcacatctgtgcacacatgcatccacacagaatcctccctcctcagatcctgtatgtatattcagagaagggggtggtggtgaagctctctttccatgtatccacaggctcagggagaacccacagttaatttccaggctgtttctgcctccctgtcactggcaactgggagcttggaggaataggctgggatccccactgatatctgggactctggtggggatctctgggccatcataacctgccagtgaagagcatgagaggggagggggagtctccggaggtgagcagaagggacgagataggaagatgagatgttgagttagcagtgcactggcctggagggctctctggctccttcccctcctgatgctcttcctggtggtcctgctgagatgccctatgacccacctgagagctggggaccagggacgactggaccacaggaggccccagagggaggcgcctgcagggagggaagcctcctcagtcatttgccccacccacagaaagctggaggctggacgtccctagggtgtgtggccatgaggagagagcctttattcctgtcctttcaggacaatgggccagatgaggccccaccaggtacttgggtttcctgggtgggtcggggctttcctggaatgctcaaccttcctggtgtcccagggttgaggtaactgcatgggaagagggtaggcaggaagcccttacggtctgtaaggacctgtcctgccctggagtctgggttcaggtggtcatcagagcctgcacgcctccaccactctcagcatgtgggcctgctccctgttcagagcaacccccttactgagcacctgtgtggtgcaggctgtgctgggaggaggcttgtgaagagcaggtgagctaggactgggcaccagagaaggaggagcccctttcgctgctggggcaggagctagagcccccacgggcatgttttggtgtggggacagattcaacaggagcccagggatctttctgaaatgtgacacttgcctccaccctccttgccagaaagggacattgctcagccacctggctcagcttcaataagcaagtagtaatagtggtgaacaaaagccaaatgcgtaagtcacgcacctgcccgggactgttctgaaactttgtgtgaattgtcttggttagttttctcaccagccctttgaggttgatactattactattgtctccatttcatagttcaaagaactgaggctgagaaagagtaagtagtttaccaaaatttcacaacaaaaagatgcatctaatctttgtcctcaagaaacaggggttctacttttactttttttttttttttttgagataggatcttgttctgttgcctaggctggagtgcggtggcacgatcttgactcactgcaacctctgcctcccgagttcgagtgattctcttgcctcagcctcttgagtagctgggattacaccacgcctggttaatttttttttttttttaatttttagtagatacggggtttcaccatgttgaccaggcttgtctc

SEQ ID NO: 155 - DNA, 2035 bp, Homo sapiens
atgacgcctcctccgcccggacgtgccgcccccagcgcaccgcgcgcccgcgtccctggcccgccggctcggttggggcttccgctgcggctgcggctgctgctgctgctctgggcggccgccgcctccgcccagggccacctaaggagcggaccccgcatcttcgccgtctggaaaggccatgtagggcaggaccgggtggactttggccagactgagccgcacacggtgcttttccacgagccaggcagctcctctgtgtgggtgggaggacgtggcaaggtctacctctttgacttccccgagggcaagaacgcatctgtgcgcacggtgaatatcggctccacaaaggggtcctgtctggataagcgggactgcgagaactacatcactctcctggagaggcggagtgaggggctgctggcctgtggcaccaacgcccggcaccccagctgctggaacctggtgaatggcactgtggtgccacttggcgagatgagaggctacgcccccttcagcccggacgagaactccctggttctgtttgaaggggacgaggtgtattccaccatccggaagcaggaatacaatgggaagatccctcggttccgccgcatccggggcgagagtgagctgtacaccagtgatactgtcatgcagaacccacagttcatcaaagccaccatcgtgcaccaagaccaggcttacgatgacaagatctactacttcttccgagaggacaatcctgacaagaatcctgaggctcctctcaatgtgtcccgtgtggcccagttgtgcaggggggaccagggtggggaaagttcactgtcagtctccaagtggaacacttttctgaaagccatgctggtatgcagtgatgctgccaccaacaagaacttcaacaggctgcaagacgtcttcctgctccctgaccccagcggccagtggagggacaccagggtctatggtgttttctccaacccctggaactactcagccgtctgtgtgtattccctcggtgacattgacaaggtcttccgtacctcctcactcaagggctaccactcaagccttcccaacccgcggcctggcaagtgcctcccagaccagcagccgatacccacagagaccttccaggtggctgaccgtcacccagaggtggcgcagagggtggagcccatggggcctctgaagacgccattgttccactctaaataccactaccagaaagtggccgtccaccgcatgcaagccagccacggggagacctttcatgtgctttacctaactacagacaggggcactatccacaaggtggtggaaccgggggagcaggagcacagcttcgccttcaacatcatggagatccagcccttccgccgcgcggctgccatccagaccatgtcgctggatgctgagcggaggaagctgtatgtgagctcccagtgggaggtgagccaggtgcccctggacctgtgtgaggtctatggcgggggctgccacggttgcctcatgtcccgagacccctactgcggctgggaccaaggccgctgcatctccatctacagctccgaacggtcagtgctgcaatccattaatccagccgagccacacaaggagtgtcccaaccccaaaccagacaaggccccactgcagaaggtttccctggccccaaactctcgctactacctgagctgccccatggaatcccgccacgccacctactcatggcgccacaaggagaacgtggagcagagctgcgaacctggtcaccagagccccaactgcatcctgttcatcgagaacctcacggcgcagcagtacggccactacttctgcgaggcccaggagggctcctacttccgcgaggctcagcactggcagctgctgcccgaggacggcatcatggccgagcacctgctgggtcatgcctgtgccctggccgcctccctctggctgggggtgctgcccacactcactcttggcttgctggtccactagggcctcccgaggctgggcatgcctcaggcttctg

SEQ ID NO: 156 - protein, 662 aa, Homo sapiens
MTPPPPGRAAPSAPRARVPGPPARLGLPLRLRLLLLLWAAAASAQGHLRSGPRIFAVWKGHVGQDRVDFGQTEPHTVLFHEPGSSSVWVGGRGKVYLFDFPEGKNASVRTVNIGSTKGSCLDKRDCENYITLLERRSEGLLACGTNARHPSCWNLVNGTVVPLGEMRGYAPFSPDENSLVLFEGDEVYSTIRKQEYNGKIPRFRRIRGESELYTSDTVMQNPQFIKATIVHQDQAYDDKIYYFFREDNPDKNPEAPLNVSRVAQLCRGDQGGESSLSVSKWNTFLKAMLVCSDAATNKNFNRLQDVFLLPDPSGQWRDTRVYGVFSNPWNYSAVCVYSLGDIDKVFRTSSLKGYHSSLPNPRPGKCLPDQQPIPTETFQVADRHPEVAQRVEPMGPLKTPLFHSKYHYQKVAVHRMQASHGETFHVLYLTTDRGTIHKVVEPGEQEHSFAFNIMEIQPFRRAAAIQTMSLDAERRKLYVSSQWEVSQVPLDLCEVYGGGCHGCLMSRDPYCGWDQGRCISIYSSSVLQSINPAEPHKECPNPKPDKAPLQKVSLAPNSRYYLSCPMESRHATYSWRHKENVEQSCEPGHQSPNCILFIENLTAQQYGHYFCEAQEGSYFREAQHWQLLPEDGIMAEHLLGHACAASLWLGVLPTLTLGLLVH

SEQ ID NO: 157 - DNA, 66412 bp, Mus musculus
  misc_feature (1)...(66412): n = A,T,C or G
aggggaaaatttactttgacaaaaagcatagcttactggggagttgtgatgatgatgaaaatttatataaagacagcttagggtgtagtgaagcaaagttacatacatgtatacagctatatatgcagatatacaggtatattggtgtgcatatatttacacacatggacatatgtgttaacatatctatacttatatatgaaggaatacgtttcaggaattagtcttacaccgttttagcagctagttatgctgcctctgacagatatattgcttcatacctgaaacttgaagttcaagttcatagaaagatcagggaagaggagatgcatgggaagtggggcacatcgaatgcactctgggacctgccattgtcacctggggtttatgagaacagactgatacctactgaaactcatcagtcccaattgcttctgatcttgatgacatggatggcctacagaaggtagaaggcggcttcattgtcgagttccatatcttcacacctcatgtgggagttgagaaagctgaaggaagatccaggcaaggtggagaggctgcaggtgtggatgtgacctcataccagtaaggtgagctaccagatgagtgacaacacatgaactacaaacaggtggtgcttcaggcctgtcctcaggagctattgcaagcatttctcttgggacctaccctaacaagagatagagagagggagaattggggaaatacacttggcttaccagagtcacaggcaacacagcactgacatagacagaaaaagtttgcactgaagccagaagcacagccaccatcttggaagctttaagcattctttccccagaattagacaggtaaagagggtcaagcgaaattcaagggtggcccttggtttcccaacctagtgtacgtacacactatagtccaactggaaatgagcctgacttatgattagaatgagagcttgcctgtgattaagttataggaaaaaaagcacaggggcaatccagacgcaagttctcaaatctgttgactgtgagttgataattattcccaatggatctagctaattaggtgaacccttacagtggactgacatctcctgaaagtaagtaatcgtggtctgaaaagacctgtggcggggtcacattttaagagtcaaaagacagctgctagcaacccacagtaaattgctggcctcgaaatgaaaacagtctttcaacaacaaggaaagaaagtctgacaacaccctgagggtgcccacacactgtccttctctgtttaagccttcagataatgacagagctggccaacaccttgatctcagctcctgatgctacaccaggctggattactggccccttgaatttgtgccataataccttagtatagatcggaattaagcttgagataatatttgattacagataattttgatacccaacaaagaaactaccatgctgattataataaagtggcatttatttttatatatatttatagataaccattaaccttgactatataaatataccacttggtgcaatgcaaaaataagacttgggaagtttccagaacattaaaagctttgatcctatatgaacccccaatgacttttgaaagatatttcaaaaagctgaaatcttagacagcacattccctaaatattcataaataaaactaaaatttttagaattaatgttcaagaaatcatattatggacagccatttggtcttatccatttacaggtatggtatgcaaagctacttaatagtgaaacattcaacatctaacatctacattttaaaattacatcatatgggggctggagccataggttaagaattcattctggaagaataacaaaataattaggttcctaaaatataaatgagttgtcttttgttctatacctgatttctcaacttcttttatgtgccttgtttgtaaaacaatttcagagattaaatactgctttaagctttggtagtttgattttgttagattgacaaatatgttaatgtagttaaatttattttttaaatacacattagtacctagagccaaggtcgcccctccctgagccaagcatgtacaaaccatcacattgattaatcgaattgataaaggaaatctcaaagaagcccagcagaaactttattctctggttaagtttcatgaagaatgttttgaacaagcatagcaagcctaaaaggaaaaatataaaatatatggtattaaagggccaccaggaagtattaaagggtcgccaggagtattaaagggtcaccaggaagtgaaatagagctgaatcctgtgttctaggatatttaattgaattaagggtgcggtgaccttggggcaagatcttactcagctaaacttagattcaggcaggtggtacacacctttaatcccaggagataaacccaagcagatctgagttcaaggccagcctgagacagagcaaattctagtggaaaaaaagcttaaatccaggcatggtggtacaaacctttaatcccaagagatagacatgtctctgaattcaaggtcaatctacaaagcaagttccaggacagtcaagcttaggcagtgagggatttggaagacagaaagctggtaaggtaaaagggggatcatgttccactgtcatcaaggtgggaacatggcagcatccaggcaggcatggtacaggaggagctgagagctctacatcttcatctgaaggctcctagtggaagactgacttccaggcaactatgaagaaggtcttaaagcccatgcccacaatgacacaattcctccaaaaaggctacacctcctaatagtgccattccctaagacatgcttatacaaaccatcacatagccctgagtaagtatggaagtttatttacacacacacacacacacacacacacacacacacacacacacacacattaatacaatgtaagagtagtgaaagaaattgttcactgattttttctttgaggaagagtgagatggaaggtaagagaagagggggagatggacaggaaaggagaaaagaagggaaagagaaagggaggaaaggaaggagggagggaggaagggagagagagagaacatcaggcaacttgggaaggtaggaggatcaggagtgcagaatattgggggtggggtaagtgacacactatcacagactaaaaattatacccatttatacccatacaccaacaaacgtttctatacatcgctcctttgttccagaaaggtatttaaggtatttaagaaagttataaaaacggtggacaccgttgtgctataagaaaaattaaaccaaccaaccattcagccaaccaacaaaaacccaaaaaccttctatataaactggtgccgaagatctgatgtgaaggaataaggaaggcgggacagtggtaaaaccagcccaaggtttattttgtatgtgtagccccatagcaccttcgctctttgttgttgttgtttttcgagacaggttttctccttatagccctggctgtcctggaactcactctatagatcaggttgtcctcgaactcagaaagcctcctgcctctgcctcccgggtgctgggattaaaggcgtgcgccaccactgcccaagacaccttcactctttaaaaagaataagaaattaaagtgaacctgagtgctggggtgtgcaattacagatcttgagcactgagtcccaaccctgaaggaaggagtttggctctcacgagagggaagaagtacacagaagcatcgcaaaaagcgggcggactatggcttctcaaatagagcccacttccagaaaggtcaacgaggtaggatggggaaaaggggaggctgccaggatcaaacaggagaattcctagatgtagtgacctggagctcacgcggatcgacaccattgcatgtctggtgccctgatcaaggcagcgatatctggggattgggtgttattgttgtgacgtttctcctcacaaagttaaaaggacgacggagttccatgagtgatgaatccagcaagcagaacctctcccacaggatggcagagtgacaggtgacttccttcagcgtgcagcttcccacatctgcccaactcctacagccacaagcggtaccagtacagctctgcagctggagcagggttgtctagaattcacaggtcagaagagattaatttggcgccaaacctgcacaggctcccttcagggagcgagctgagggcttcaatgttgtaggtcagacgagttgctattatcttattgtagagaggacagacctgctgcagtgtgcagagcgcctgcccccaagttcgtcttccttgggatacaaggatggctggaatcgtgcccttcccatcctggcagatttgcgagctccgcagtcagcatgggggagggggttgtgtgtgacgtcaggtagtaactgttaacagcctcctgctcttcctcgtacactgtgggcttttaggaagtccccacagttgcctggtaagggtctgctattgacatttcaccgtgatgtcccaaatggttctgggaggtccgaggctccgttttaatgggagaactaggaaaaaaccaactgttgctaaaatgagcttgcttaaattatagcacatgtgtacaagggaatattgcacagtcattagaaaaaatgaattatacactggcatagaaaggaacagaattgattctggagagcaaaaccagttcgacctagtaaacatctcacttttaggaggaaaaccatacacgtctactaatgagaatcctataggagtgtgttccaattctagttatctcctaggccaggagttatgagatttggacatttcactgaaatgtttacgactgttttgaattaatatgattttatattcagaaaaaaaaaaacaaacaaacaaaggttacccctcacaacccccaaatgaaggagaaagtgatgaaatggtaatttgaagtaaaaaaaaaaaaaacagccatgaaaaaaatgttttcagcataagagaaacttgtgcttgttttggtccctgggatagaagccagtttaagaaagaaagggggccaggggaatgttaactggctggagtcccacagagccaggattagtgtgccagaatgagggctcactgcaaggagaagacaaagaagacagaaacaaaactggggcacatttttgaggaggaacatgaaaagaattatagccaatgaaccctacttctttttctgtgggatcccagggacaaagatcagccgtgctgggagagagagtagtgggaactgaaggggccttggggaggcactgcctgctgtggagaaggaagcagggtggggtctggatagtcaagtgtactcagggctcccctggggtccagccccacagggacagttgattataactcctggtaaaagtctggagtcaccaacatcaaaggttaactggagacacagcagcagtactaacagtgtatcataattacccaccacagggaaaaatcaatactattatatgagctttcctagtatcatccagctgcccgaggagagaagacttgagaaaaacccatggccaagcatacccagagttgggcttgaggggtagtcaagagccagcaggtcagtggaactcaagatgcaggtaagtgcacctgtgtcatggagccaggctcactcacgaaaaagtaggtggggagggaggctggctttgcaagaatggctaggcagatttcagaaagagtatggtttaaaaaaaaaaaaaaagaggaatggccctttcaatcagtgagatgaattgcagtgttaaaagattgtgcaagaggaaccgtcctggcatgtgacatcatttccaagagtgaattggcagagctagagtagagctaaagctgaacaatgtaggggaagtaaaaaaaaaaaaaaaaaaaaagtgacgtcagggtatggggggtggggtctgatttgtggacaactggcgatctcatgagtgggcaaaattaggcatgcagaagagaatgctggagccagggagggtcacattcagatgcgaggcctgggcatttcatatggcactgagttaggactgtctacagcagaatgggtcaagctgttgacaagtgtggaacagccttccaggtgtctgtctgtggggttttgactcagtgtacctccattttattgggtggggcagtcctttgcagaagcttttcacatagactattattcctgagcaaaagagatctgttttcttgaatccccagtgcctaatgctgtgtctgatgcttggccagtagttagtgaaatgttttcctggatggctgagagggttggatagatagacggaagcatgaaaggatggagagagggatgaagagggtggaaaatggatggatggggcatgatgtaaaaggatggctgggatggtatagattggctggtggatagatgtcatggatggatggacagatggacagatggattgacagacagctgggatgcaatggattgactaatggctgcatggatggaaattaccagtagccccatgcatccatttagaacattaaaggggagagtgtttccataaagatggaggaagggcagagagacagatgtacactacttacccctcttagagtacttgggaggttttgcttggtggctgtgaggagttaatgattgacgatgagctatggtgatagtgaataatagatgctaacctccttcacctaagcatgaaatctctatttctaggctcttcactctctctcccggtcagtcctaatggctccattggtcatctctctgaacacaggcaccctttgcatgtgggcccatactgcttcctgcttcatatctctcccatgcatgtgtggtttcacatcacacaagtggaattcataatctccactgcagtcctgggcttctccagggctcctctcctatcgctttgtgccacctgccccagccagctaaagacccagcacagcactttgacggtttctttccttttctgtgtctaacctaccagccctttccgtttcaggacatttaaacagcttccacttcttccactatgaaaactgccactcagttttagagtcatgtaacacctctacatgaatctatatgtggctatttaatcccctctccagctcacagcttggattaccttccttaactgattaaacttgctcattggtagtttaatgtaagtacttagggcactctccttactgtcactccgtccctgtcattcttctgcctccccatagcaccttgtcttccccatagcaccccgtctttgtcttgtttgtgatctgttatctgttgttgttttgtttcaggacagggtttcctctgtgccctgattgtcctggaacttgctcttgtagctagggctggccttgaattcatagatctgcctgcctctgcctcctgagtgatgggatcaaaggtatgagccagcccaacttggcttgtgacccattgattttaaccaggactgtctgtgtggcaatgagtttagagctgtgccttagagcctggtgggcaaccatttgttgcacaactgaatccatctgtagctaagttgtcagggacagctaggagaggatgatctttttaaaaacccaaagatctgacgacctcatcgacctgtctaatctactccaatgatttatgacacttttaacctgatacacaatttacaaggctcagtatagtcttgtttctcccaccccagctcattcttcacactgttccttccttcaccctggaggctaaccacagtgggtgtttctctggttcttttataggtgtcattttgcccccccatccctcaaagtctttcacacccacttccttccccatttcatgtgaataggccctgtgcctcctgatctcagcttagacataacttcccagaagacactgcagagatctctccaacaaggtggactccgcttgccgtatttgcacatggaaatacagcccccgccggcagagcatgtgtcctcggctggagttgtctgttcgtgtccctgtgtgattgtgtctaatgttggtctccgtcatagccagccctgtgacaagcaagactgccccgtgcttttgctacaggcagtgcttggcacacagcaagtatgccataaatatttgtcaggtgagtgagcgtggactctgaagaacacgctttgtgtcttattagctgaagtcagagcaataaagtcctgttcctctggtcgagccaccaggacttgggcataatgtggtcataggaaactctccaagacaaagctatccatgatcacctaaccaggagttaaagcaaacttctgggtgtttcagctacatcctcatcatgaccatttaatcaggaattaaagtcgaaatgctagattgttttttatttatttattttttaaatttatagtattgacctcttcggtctgaactgtaaactttacctgcagcttaggtgtttgatcctgcctctgggctcttcccagctgctctgctcacagcctcccctcaccccttccagcctgcctcctcagctggaaatgattgagggcctcctgcaaaggtagaggagggccccaaagaagactgggaactgggcannnnnnnnnnnnnnnnnnnnnnnnnnnnnnnnnnnnnnnnnnnnnnnnnnnnnnnnnnnnnnnnnnnnnnnnnnnnnnnnnnnnnnnnnnnnnnnnnnnnnnnnnnnnnnnnnnnnnnnnnnnnnnnnnnnnnnnnnnnnnnnnnnnnnnnnnnnnnnnnnnnnnnnnnnnnnnnnnnnnnnnnnnnnnnnnnnnnnnnnnnnnnnnnnnnnnnnnnnnnnnnnnnnnnnnnnnnnnnnnnnnnnnnnnnnnnnnnnnnnnnnnnnnnnnnnnnnnnnnnnnnnnnnnnnnnnnnnnnnnnnnnnnnnnnnnnnnnnnnnnnnnnnnnnnnnnnnnnnnnnnnnnnnnnnnnnnnnnnnnnnnnnnnnnnnnnnnnnnnnnnnnnnnnnnnnnnnnnnnnnnnnnnnnnnnnnnnnnnnnnnnnnnnnnnnnnnnnnnnnnnnnnnnnnnnnnnnnnnnnnnnnnnnnnnnnnnnnnnnnnnnnnnnnnnnnnnnnnnnnnnnnnnnnnnnnnnnnnnnnnnnnnnnnnnnnnnnnnnnnnnnnnnnnnnnnnnnnnncacacacctcaccccccaccctacccccagcgctgggattaaaggcagcactaacccaatgccccataaacttacatttcggagcctttaaactgcccttccataagttaatttagttatttctggagcccttcagaaagactccagcagtcccatgaactccccgaggcactactagagccagcctagtctctttcccttacactctccagtttggaagaaaaccttcaggagagaatgttcacagtgaaggtgtctatacctgattgaactattctaaattacacccaaactgcccacttccgaataggagaaaacaaatcatcagaaggctgaagttgtgtaacaggtaaatctcttctggaccaaggcccatctctggtttggcaacccaaccaacgtagcatctcttttctcatctcctggaaaaaaaaaaaaaaaagaaagaaagccaacagagaaaaagtagccagagaacagagaataaaggtaatgattaatctgtcaagtacaaaaagagtcattttgaggatttggaattataactcattaatgcaaacaaatagcaatgagctgggagggagggaggggctgacagcagaggcagacaaggattaagtcacagttcctaattaggacaggctctctgacacagtcaggtatctctttagtcgcctccagagatccgtgcagagctaagtgagcttggtttttttaaaattcttttttgtttggtttggttttcatgtggtagtgaaggcaggaaactgagcgagcagaccttggtggaaagcttacctctggcagaaaccccaagatgccttctgagaaggaccgagccaagaagaacctcgtgcagaggctggccctgaagagctgtctggctaaggagacactctctgagttcctgggcacctttataatgattgtgagtattgctcgatttccattttcccagttcagacctaaccccgccttcctggctgccaggcgtctggagcagggcgtttgtttttttgttttccctgattatcagttccagtcccttctaggaggcagcaagtcactttctaggttacttgactatttggtgaccattaagagcttcgttcgctcttaacgtgtagccaagacagttgataggagtggagaagggggaaggggagtacttcttcattttaaaatgtctcaaagtggcttttatgatgaaagagttgctagacattgcttcccatttggtgactgagtcatctgaaacaaacattaatggtcaatagatagcgtggaacaggctgccaagagaggtgcctggcagttttgtttgtttgtttgtttgtttatttatttatttatttatttgtgtgtgtgcacgaatgcacacaagtgcatctgaaaatggcctggcagttttatttatttgtttgtttgtttgtttatttatttatttatgtgtgtgcaccaatgcacacaagtgcatctgaaaatggcctgctggagtcagctctccttccaccatccttccaccatgtggactctagggatggagctcaggtcatcaggcccggcaacagggacttttatctcgtgagtcatctcaccggacctacttagtaaatcagaacttggggttagtatggtgtgtgtgtgtgtgtgtgtgtgtgtgtgtgtagccttgtgttggtttcatataatttctcccttttgattgaacttgacttgagcaaatctctcaaggtctttaaattgaacttcatagagttaaacatggacaggcctaagaatctcaaaaagagattggctcagctatgaaaacaaacaaaacaaagaataaaacagagaccagaaactattgctactttctgaactggtgtgagccctggcctcaggctttttttaaaatgggacagctatttatttctatttatctatttatttatttatttatttatttatttatttatttatttatttattttggtttttcgagacagggtttctctttatagccctggctgtcctggaactcactttgtagaccaggctggcctggaactcagaaatccgcctgcctctgcctcccgagtgctgggattaaaggtgtgtgccaccacacccggcttatttaattttttagaaaacacacctgccagagagagagacagagagacagggagactcttacttcaggtataatttcagcttctcgttctcaaatatttctctcttttatttatatgagtacactgctgctgtcttcagacacaccagaagaatgccttgatcccattacagatggttgtgagctaccatgtagtaactgggaattgaactcaggacctctagcagagcagtcagtgttcttaaccgctgagccatctctccagcccagcttctcaagattctagaggactgtctttaagtgtgcatgttatccttggctttggatcattgagaaggaaaggggcaggatgtgtaggctgagtcaggactggagggttcttttccttctttcttttcgctgtccggaagctccttatttttctcaccatggtcagggtcaggacttaggtctgggtggttagaagaaaagggagggggaagcccccaagttatctttccagtgagagcttcctggaagattgccccagccagatgtggagatgcttgggagtgttctcgttgttaaattagggtctcattacttagctcccgttggcctagaattcactttacagaccaggctggcttcaaactcaaagagatccacatgcttccgcttccaggatgctaggattaaaagcgtgcatctccacacccagcctggctcactgttgatgtttgaaaatctgaccttcagaaggagttgccagcacagtctgatttgagcctgaaatgacttaagcagagaattgaagcagagcctgaatcacctctcagtgcagaaaacaaaggggagggctgctcaacttccttttctacaaccgaaaaagttttaaagcccttccctctttcttaatcagtttcatgccgggcgtagtggcgcacgcctttaatcctagcgcttgggaggcagaggcaggcagatttctgagttcaaggccagcctggtctacaaagtgagttccaggacagccagggctgtacagagaaaccctgtctcagaaaaaccaaaaaaaaaaaaaaaaaaaaaaaagactcaagaatcagtttcataatcccattgcacattaagacgatgaaaactgcttctagccattcacccttgagatcatgaagtcctgagccatctccctcttgctcctatcattctgcttccttccctaaggctggctccagagacttgaggtcgccttttccaaggctagaaattctcaatctccaccctcccctgcccctttcaagcttgctgtaaaacaatttcctggaaccagcccgtgtgataataggtcataagaccctcgataataggtcataagaccctcatttcagaaaggcccatcctcatggcctggaagaaggaatgtcattgccaagagggacagagaagaatctcgaaagacaagcttgctgacttcccactcagtgagttttattaacttgttttgtgtacatggtatttagacactttccctctgagctatgccctctagccctaacctagttatatggccttgaacaatgttctgaccttcacctgaccttcatgcttcagccttgtctttgtagtaaaaagtctccatataaagttgaaaagacagccaaacaggcagagggtcctagagggtggatgtagaccctgcatgtctcctcttattcctcaatcttctcttcctttgtacgcctcacggaatcctttagaataaacctgtgaactcagggctccctcgagttctgtgaaatgcacaagttgaccaatggaaacccaaggagagagttgtaggaatttcaagtcagaatcgatcagtcaggagtacagttcaaacaacctggagtttacagaaggtatctgcagtgggggaaggtcactctgaggcctcagtgctcacccagtagatcccgatgctgtctccactcacactgtgccattgttgagtatcattgatgtcaactgcaaactagactgtctgattactgatggggagttaactccatggatttgtggtcaccatgttctgtgttgacttccatggaatgagaagagtttcacccacacagaccaacaattcgggcagaagctagacacggaacagctaaacgccgcatggtagaaaaatgaactttattctggccaaaggcaattctgtcatgaatgatgaattccaatttacatcgtatagttatttgctaaagtaaagcttggtataatatagaactttagttgtcgagttctgttttgtgtaagcctgaaagagaagtgcagataagaagtgtaagtttttaaacgacaaatcccctgacagttggatgacaggtgccgccctggagaggagggtcagcctcgtgcagagtccagtctgtctagtactcttcccaagttgctaagctcctagcatgtagcagccccgtggtagaatggtgcagtggtttagccttctaaagtacacgctcacatactgtctattacattcattgatttgctaaagtcaggcacccctccccctcagctcaggcacccctccccccatcagctcaggcacccctccctctaaagtctgtacatgtaaggcagttctgagggttgttactggatctccagtctcagcttcccccccactcagtggccagttttatcaggagatattttactgaaatccatctcagctcatttctccatcaaacccagacagagagagtccttgctgttggaaccacatacttctgtgtaaggacaccccaatacattattttagatctatcggcaaatgcaaatcttgcctggctttttctagtaaagatttgcccacttacatggcctgggaggagaacactggaaagatggcagaggttagacacatcgctcccgccttgcctgatctcaggagtctaaagccatctcagaatctgcttttggagggtccccctcatacccattcaccccatgatttgaaatggccaaggaggcccggtggtagccctcaggaaagaaaaggctcagggaaacagtccttgtcaatggtggctcaaaacaataccaagcaagtcataagccaaggaatgagcaggaatctggccagttagacattgggaccttttagatatgagcctttcatctttagtgatgttagggaaaggctgccaatgcgcctgcgcttttggggaggggaggttcaagcattctgagctgaagaaaagggagcatggggcaagttcccaatgtgtatcaggctgctgaggtagctaattaccaaggtggccatagtcgctgttgccgtgagttcatagttttatcagtaataacaagtggcagctaacagtttctttttttatcttccataaactgttgaggaaagggaagggtgaggcctcgaagagagaaatgcccacacctgaaaggcattaaaacttatttctttccaattgaggaagttaccatttcaagttttaaccaaggccgggacaactgtacggtagattagacacccctaccccggctctcacctcgccgccggccccccactttcttcagcatttccatagatagaagccttcagctgtcatgcgctcatggccataagaattgattggtaaatggctggccaggctgatgacaccaggcatggcacctgggtcacccagtgtcttcacctctcctgtgtaaaaaacaaacaaacaaaaagactgtttctgtgagcggacacaaatgaaaggcaggtaggaaggagccaaaggcagggactgcttgcctgggtttgcagcgcgggaccagcaaactgcagaagttgcattagccctaaggttccctgggggagctagcaatgtcccactgcctgtactgctgtacttctcagggggtgttttggtttcaaacaattagcgcccccccccccaagtctcaaacgcagctaacacaggtgagaactgaatgctggggacacataaagtccctccctggagccagaaatggtctttcttgcctggggctcccctaccccaccccaccccatcccccacctcccatcctcctgggcatctgccagtggctttcctctgcatcttccacagagctctgaacaaatgcagatgggacctacatgaaaaaatgaaagtctcttcttccactgaacttcccaggacctgtagctattttgcactctttttcctagaggctatggctgccttgtgctcttctttcacctctctttccattcttggattcttcaatgcaaagctcctcttgtggattttaggatgctaacgcctcttacctttgatgatgagggaagggcatttttctgaagtggacgctatggtcagtgggggagactggtaattcgttcctaaccaccaaagtttctcccattggagacctatcttttggcatctcaagagtgaaaagaaaacataactgctttaaataaacacaatcccttgatctgtgccctggagggaaatgaaaagcaattgtcctggaacacagaacacagaggggtaggggcgtgggcagcatggactgcggacatcacagaccccacagagtacaggggtccttgttgctctcttccatgactgggcccctctctgggagcatttgcaggtttcaagttccattctgggcaggttcttggtcagacatagtcagagaaataattgttgccataaaatgcatgtgttccagacagcaagtgcacttcctactcaggagagttttcaaagaatatgtggtcagtgtttcaaatgaattcatcaaatttttaattcagcctcctgattaaaggagatatccacttcgtagggcataatccaatgtaattctggtctactaggtgactcagaaacactgggtactaagctaagggtgaataggcacgggtcgattgattcctttctgttgaaaggggagctgaggcccagctgatgcaattctgggttctggccgcctagagccagcagccttaggcccctgggcttcctctgtcctttttcctcctgtgagcacagagcgttctcatctggactctgccttgtttctacctttttctggaagacagagaaaggaaactgaccagatcagtttgtccagataaagaaacaggaataacgcccttaactttctcattcaggatcccccagcccttgtgctggccttgatacgctgactgctgccaccattattagacaccagagatgtcacatgatcactactcagagcagatatgattgtggctgtggcatttgctagaaggccctactagcagtatggggacgtctttgtttcctacaaacatactcgaaagctcttgcaacacttgggtcctgaggtggctctgccacctgcccatccaatcatgactcttaagccccactgaccgtgtagttcacagctttcttttagcttttctgttttctggattctcttggagacctctactcccaacactaagggcagggcctcactttgtagttttagctggcctggaacttgctatgcagaccagactggactagaattaacagagctctgcctgccttgccccctgagagttgagattaaaagtgtgggtcacaactctcagtatgagacttcgatttttttctcgagacaaaggacctactgagaactggatctcaaaagattggactcttcgctctttctggctcagtcagagccttttttttttttccgttgttttgttttgtttttcgagacagggtttctctgtgtagccctggctgtcctggaacccactctgtagaccaggctggccttgaactcagaaattcgcctgcctctgcctcccaagtgctgggattaaaggcgtgcaccaccacccaccacgggcccggctcctcagggcctttctgtttcctctccaaatactcttctagttcattgttttgcaaaaccacctcccacttgaatggtgaagactgagggttacaggaaactagagcttccaataggcctgtggggcagtgactcagaagtgtctgcattcagcagcgccctggctcactcaagccaaagagagttgctgcagcttgttaaatctgcccagagtctatgtgttaaatctttggtccataacctgtggtgctgcggagaggcaaaggtcccatggaggaagttaggtcactgcggactctggtcccttcctttctccttttgcttgtcaccatgttcctccccatgcacttccccaaaagcctgaagacaagggagccagaccctcaacttaaactcctcaagctatgcaccaacagaacaaacctctcttcctcttcctctgctccctttcttgttttgtctttgagatgaggtttcattcaggtaggccaagatggcctcaatcttgctgtgtaggtgagttggccctgagctgatctttctgctttccagctttcgccattggggttggttataggcgtgtgtcaccatgcctggcaaatcatgcattcttgcatgttgtttcttgttttgttagatccacaggaagctaagccacatggagggtttgtttgtctgagctgtcaggatcttctgtcctcaggcttccacatgggggcttcagtctgatgtggggtctgatgccaccgtctttcagatgaaggaccagagactcacaaccttagagaactctgctctgttttcatccccacacagcagggcatcggaactctcgaagtcaattccaccaaacctctcatcatttttattatttatttgtgatttgtgtgtggtatgtgtagtcctttgcgtttctgtacctgggtgttctctatctttaagaaagcctaaggcttgaaaactccaatcctgtagaagagctaactctcccctaccctagtcctgggtgtttcacaggggctctgggtgcaaaagatagcaggcctccctccaccaagtaggattaaggcaggaaagtgtgaagtgaatgggtcatcgcttattaaacataatttttacaatcagacacactaaaaagttagggcttacgtggcatgcccaagcaggtgaactgcagagccgggaatagaatctctgctttccctccactctgctgaagcgagcattcctggagatgcttttgaattcaggctgccgtttcttcgtgcagctgtatgttactgcgttggcagctttgtacgtggctttctagtctttctcccttcttggacgtatgtagtggaatttaagggtgtgtcaagacctcatcaaccgctgctctctctaggccacagtcctgtagtgggcgtctttgtacaggtctcctgtacctgcttgcaagcttcagcttgatgtgtgtttttaagatttctcttcaaagtgaaatctttgtgcttccagttgtaacctatgacccttttcaactttccttatattcaagtatgggcgttaatgccctgttcccctatttttccccccctcactctcttgaaagataggacagagaatttcagtagtaatttccctctagcctgctgtgatgatcatttttgcacacacttctctgagccatcaggtttttctctccttgtgaaggaagacatgtgtatttcaggacaatgtgtgctccctgctctcatcttctgaccagtcctctttgggatttcaaacatgttcttcacagttataggatatgggtattttagaaccagacattaaagctatcctgtggtttatcaaggccaactgcttttttttcttattattcatatttggagccctgaggcagtagactttactttgatgtgtattgtagaataggtggctgtcatccctgtctggaaagacagccagttggcccagccccactctgagcacaattcccattcttcgtggatccagatgacatctttgccatatcccaggttacatatgtgtgtagttcatttctgtgtctagaccaatcagattgagcaatatgactaatgatcagacttgtactaatgccacatatttttgttacaaattacatatttttgacaattttaaaaaattgtcactttgtcaatattgtcagggttttttttgggtttttttttttttttttttttttttttggttttttgagacagggtttctctgtgtagccctggctgtcctggaactcactttgtagaccaggctggcctcgaactcagaaatccgcctgcctctgcctcctgagtgctgggattaaaggcgtgcgccaccaagcccagctattgtcagctttttatttcactatatgaattgcagattcaacttaccaagttccttaagagaaaatatgagttaaagttatacatcattctagatacaactgataacgttcagaatgttgaatccttgaacatgaaagtagatctatcattagttggctttttactagaatttatactttgtatcagtcgtatacattctaaatagggtttcctttgttttgtttttgttttgctattgtcaaggatttctctttctgaggctaaggaagactttgctactttctgtttcttaaacacttgatttcttctgctgtcacatttttgcagtttcaacctcttgtgtgctgtcagtagaaagccttaataatgttatcattttattgtcaacatcgtgatcttttgttattaaaaataataattcctggaggatgctagagacactataacttcaaaagaattcttttattttattttattttattttatttttttttttaaagaattcttatttagggctgattaaaaaaattttagagtacaatttctgcagttattacatgtagatttatgtaagtctttgaaataaacatgtcagcctgctttatccgctcatacagtcaattctattgataattttagcactgactaagccctatattcttcatactaatccctaattaatcatcctacacctaatgtgaaatgttttattaaagatttagatcataattcggaaagatctatctatctatctatctatctatctatctatctatctatctatataaatgttttgcctgcatatatgtgtgagtgtaccatgtgcatgcatggtgtctccaggaaccagaagagggcattgaattccctggaaccggagttgcagatggttgtgagctgccatgtggttgctgggaaccaaacctggatcccctggaagagtagccagtgctcctaaccagagtatctcactattcccaatatcgtattttctatatattgtccttgttttattgtctagttttattgctaagtttgcagtgggcccctgaaatgggttgggattatttctctcctacctattttataaaatgcttaattttttttttgttttgttttggtttttcgagacagggtttctccatgtagccctggctgtcctggaactcactctgtagaccaggctggcctcgaactcagaaatccacctacctctgcctcccaagtgctgggattaaaggcgtgcgccaccacgcccggcaatttttaaaaaaaaaaatttgtatttctttatcttgtatatgtgtggttatgtgtgcatggggagatcagagtatattttgccagttcttgccgtccaccatgggggtcctgggagctgaactcaggttgtcagacgtggcagcaatcaccttcaccttgggagtcatcatctcataggcccaagaatactttctatatggtgggagttatccagtccttaaagattgttcaatgtatatataaactagaggaaggagagagggggaagacttctttaaaggtcattaatggacacctgcgcttctagttcttggtggggcagggggggggggcaggcaaggagggtcaggattcaaggtcatcctgagcaccaggcttagcttgaagcccacatgggctacaggagacccttctcaacaaagaaagaaacaaacagcccctataaattagaagagaaaggaaaaagataaagacattgtgtctcatttgctgtttcacacatacgtttcaaagttgctaatactttgaaaactaacggttttaaaagcaacaatgttgacaagaatctacatagctttctctggctcttgagatctctactgaaccttgtgtcgtagcctagcgtgcctcctctacaacttttacaaacaaaggcttctttgttttccactccagcagtgtctgctctgatcattctgtcttctggctgcctccacagctttcctcgccccacatctgccccactccgtgggccctttgtgtgctgtgggtactttgccttgtgtttgaagaagctccttacagtcctaactctggccatctgttcccttccattaatctcctttcatatctcaattccccatcactgtcattttttagtgaatttaaaaagatagaacttctacttctcctttgatgattccgtacacggaaccgatcccacgcattccagtttcccacctcctcccacagacacctcccatcaagccctctctccttttattttgttgatactattatcagtgcagacttacctacatttactctcaactgctgactcattttataattaaaaaattagttgttacaagcttcccttttattacaatattagttaggattaagttctcgctaccaacctgtcctgtgtgccgctgttcaacgatctacagctcgacagtgttcccgaggccttaggtcaccgagtcttttccttttgctaagctctttctgctctccgcatacagtttgtttatcagatgtcatttctcaggatcggctaacttgagtgatcattttgggatttgttgagtgtagtggccagagcgtcccaaacttcaggattatcttgagtgagcatctcaaagcgccactttcagctacagttttcgctgctataagaaacctccacaaaagcgaaatctttggtccttgctcctgccaaaaaggcacgtgggagaaacgtgccttccacctctgtgaacatgctccttgctaagtgatcaactagtgaatttataataggcaggcatcttccaagtttctcttgtttctgtttcagatatattatcagcctttaggtcctttaaaatctgtatttcttcggtagataatactagaactaaaaaaaaaatgaattctaagattttctattacaagactgaatatctattcattcttcatcttcattgtaaagacttgccatttttgccagttgtggagaactattaactttgttacctgtctttcttgtagtctgtttttagaaattgactgtgtgactttctccatctttgtatttgtttgttttgttaggacgggtttctctagaccaggtgttggcatcgaactcacagagacctgcctttgctcccaagtgctggtatgagtttgtatttctcatggccactcccttcatgctgagcctcccgtggttatcttactttggcctgaggctcactaactccccattccactgtatctaatccgggtaatactagacacagaaacttgagttttattactgtaattttttaaggatttatttatttattttatgtgtatgagtacactgtagcagcacagatggttgtgagccttcatgtggttgttgggaattgaatttttaggacctctgctcacgcaggtcaactttgctcgctctggttggccccactctctctggtcgttctggcccaaagattgatttattattatacataagtacactgtagccgacttcagacgcaccagaagagggtgtcagatctcattatgggtggttgtgagccaccaaatggttgctgggatttgaactcagggctttcagaagagcagtcagtgctcttacccgcggagccatctccccagcccccttgttactgtatttttatttctttaacttttcctttaacattcccttagttgccttttttgtcccccatgcttattggctttataactttgtcctccttaagcccagaacactcataatagtttaggtctcttccatcttctcaagatgttgggagctagtcatctgattgcttaatctattggccttccttcatggaggagtagcgatcataagtgtgtactgtaaatgccataggggttttgtttctttgtgggatttcatatggtcatctcacattgcttcctctgaagcagattttcttttgctcctaagagattatcgtggtccagggctagggctcagtcagtagagtgcttgtctagcagacaggaatccagaagtccattgcattcctaacaccacataaactgggcgtgaatccccaaatccattgtgttcctaataataataacaataataataataataatgataatatgggcatggtgctagtgatttgatccacacctataatttaaggcctgtggaagcaggaggatctgtggttcaaggtcaaccttggttaccagtgacttcaaggacagcctgagctaccttagactctcaaaaataattataattatatatacatatatatctgcatatgtatgtatatacatattattgtgaagcagaaaaataaaagcagatggtcagaagaaggaacctgctgcagaacactgccctctaaagaacagctctgtgtttgtttctcctctctcaggatgagatgggtgaccacagaaaggaagccacctcatgcttcctctccacaaagctggtcctgtccaactcctcagccctcaagccagcaactgctctttttgttttcctttgtcagccactattgtgaagggacagacttcttcccttgaaagtttccatttccaatagcttaaaaagaaaggtctggcaggagacagctatatcaggctcctgtcagcaggctcttgttggcatctgcctagtgtctgggtttggtgtttgtatatgggatggatccccaggtggggcagtctctggatggtctttccttcaggctctgctctgaactttgtctctgtaactccttccatgggtattttgttccccattctaagaaggaacaaagtatccacactttggtcttccttcttcttgaatttcatgtgttttgcaaattgtatcttgggtattctaagtttctgggctaatatccacttatcagtgagtgcatattatgtgcgttcttttgtgattgggttacctcattcaggatgatatcctccagatccatccatttgcctaagaatcttgtaaattcattgtttttaatagctgaatagtactccactgtataaatgtatcatgtctcctgcgaggctttgccagtgcctggcaaatacagaagtggatgctcacagtcatccattgaacagagcacaaggtccccaatgaaggagccaaaaaaatacccagggagctgaaggggactgaagccccataggaggaacatcaatatgaactaaccagtacccccagagctccttggaactataccaccaatcagagaaaacacatggtggaacttgtggctctagctatataagtagcagaggatgtcctagtcggtcatcaatggaaggagaggcccttggtcctgtgaagattctatgccccagtagaggggaatgccaggaccaggaatgggagtgggtgggttggggagaagtgggaggggggaggagataggggattttcagagggggaactaggaaaggggataacatttgaaatgtaaataaagaaaatatcttaaaaaaaaaaaaaaggtctgccaggtgggcaggggaatgggaggatgggagggtggcggtgcatggggcacagatctagaagctgcagcctccggaactgctggagtcaaaaggaccctgcttgtgaatcttgtcttttcatttggacccagaaaacatttttgttgttattgtcgactctcaaaagggagctgctccttctccttctccttctccttctccttctccttctcctccttctccttctccttctttctcctttctccttcttttcttctttctccttcttccttctttctccttctttctccttctttctccttctttctcctcctcctcctcctctttttcttgtttccagaagtgggttcacctggtttttctttgatgacagggttcccattacctgctaagaaaggagaaacctgggactagcaagaccctggctcctccatactctacagattgggatggagatgcagcttgtataaagacacatttttattttttaagttatgttttagggtatgtgtgagaggctctggtgagcatggaagcatgctacgtgtagcgagctcgtggggaagagaggacaacttggttctctcctgctgtcttagccagggtttatattctgcacaaacaccatgagcaagaagcaggttggggaggaaagggtttattcagcttacacttccacactgctgttcatcaccaaaggaagtcaggacagaaactcacacaggggagggacctggaggcaggagctgatgcagaggccatggatgggtgctgcttactgacttgcttcccctgacttgctcagcttgctttcttatagaacccagggattgcaccacccaaaatgggttgagccctccctacttgatcactaacagaaaatgccttacagctggatctcatggaagtatttctcaagagaggctcctttctctgtgataactccagcttacgtcaacttctatcgtgggtccctgggactgaactctggtcatggtcaggtttggcatccatcacctttacctgctaagctatctcactggctccaaacataacattattagttactatggagaataaaatatgaagtgtggggaagaaaggaggtaaatttcttatgtttctactttgaaactctttgtatgcccctgcgcattctctttaccattttttctcccccatgaaaaagctggccccagtgaaatgtgtctcttccccctcttatagaacattgtttgtgaagtgctgtgaatagcaatgattcatgggtggaagggagcatgctggcctttctagatgcacttgtgagattggaggttacacgaactcaagcagaattgacagaagccttcgggctcactataaagggggaagtagaatatatttaggatagctggaccatcgactcttccttgtttgaggagcacctagtgggtctggtgctttgtggagactagtgtcctcagaatcgcagaccctggaatgaacctaggagacacaccaatccctaggctcctccgccccgggggatcttccagggtgaaagtgacagaggtttcagtggacgttgccaggtgctgcgcaggcagggagaaccattctcagcagctggcatcttatcttacacagcccagggaccgaagcttatcctaacgtggcgtgtgctttccaagccagagcctgattagcttcttgccctggcctctggaatcaggatcaagttctcatgaagcagagcatctgggttgaatagagggctgtgggtgtcctttgcgagtcagaatgggagcccgtttttcttctcagccccattgagataaaggagttcaaccatctttcgtttctggggcctgagttagttggtgggcatcttttctcctccgagggcactgggcttggccatttggctctctaaccagctcccaagttgaaggtccctctctcttgacaagcccgtcttaacgtagagccttttcagtaagacccattctctcaacgtacgagcctccagaaaaatgcctttttaaccagaatgcccagatgaaagctttagctctttatgacttttattttatttttatttcttgctataactgtggaagttttatttttgcaattgaaaaacttactatctagaaagctgagcgtaaatacggacagtgttctcatagagaacccagagaagcagtggttctaccccagaaagaaccccggggggaccagaggacctggctctggctcagacactcagactccagttatctatttaaaatttttactttttttatgtgtgcatgcatgcgtgtatgtgtgaatatgtgtacattagtgcaggtctccttggaggccagaagagggccccagatctcctgaaggagtcacgggtgagtgtgaactctccagcctggttgctaggaattgaaccctggtcttctgtaagaagagtatgtgttctgctcagctatctgtccagccacagacttgcttcttaaaccagaattaattatagggaggaagccaagtacctggccttgtctggcctacagcacatgggttctaaagtgtgccccgtgcattcattccatagtgaaagaagtaagacgtcaaaccttggtccagtcactccctgtttgtgtgaaccagaggagctctcctagcctagaagccatatctgtaaattatgacaagtgatccgatgcacagctccagggaggaccaaggagctaatctacagaaactacttaactcacaaaatgtctcgttgctgtggggcccccttctgtgaccttctgtagcttgctttcagtcatggtatcttatagcagcgaaaagtacttaatacagatattaatcctaagtagctcccccaaatgctggccagtgccatagcttatgacatagccgtttctgtggtgtgtcggtgtggggagcaccccagaatgcagagcagaggacagcctcaggtgtaggccctcaccatctgctttgcttgaggcagggtccctttgttactctctctggtatatgccaggctacagctgatcatcaggcatcaagtttcaagatcctcctgtctttacctcccacctggagacaggagactggatgtaggtatgtgggaccaagcccagctttctgtggactctggggatcagaattctggtcctttcccttgagcagcaagtgctttaaacactgagccatctccccagccctgggacatcttgtttgacactttaaaggaagtgatagatatatgagaccctcaagaagggtcacagacagcagtagcagcaacaacagcaacaacaagaccacgagggcccagtctcccctcttccttcttactgccctcagcaattcataaacagtatttcatcatgcgaagtttcatgttgtgtccagtaagtggtttgtcacaagcttgtgactcaaactgttacttttgggacttccaaataatctttcttagaaatcacacttctttggatttttatttttttaaatcatcttagcccaagcttactttcccccccccatttctgcaatcatgattgcaagaaaagaagttttgcttgtgcttaactatttttcatcgagtattattttagcatgagtattagaagaataagcactgctggcagacataattgcattatggcctttggagagtatgttgagacattgtctcacataggaccagataggtagatgagaatctcttcaaacttctacctccacgtggtagatcttcctacgtccatgtggcacccacattctgggattacaggtaggccatgcctttgtgaggtgctgaagactgaatccaggacttcctgtatattaggtaatcactctatgaacttggctctatatccaggggacactagtcttgagtggtagttctcaaccttcccaatgccacaacccttgaatacagatccccatgttgtggtgacccaaccctcccccccaaccataaaattatattcattgccatttataactgtgattttgctatggttatgaatcataatgtaaatctctgttttccaatggtcgcaggcaacccctgtggaaaggatctttccaacccatagggtcatgacccacaggttgagaaccactggtctttttttttttttccttttagatattttctttatttacatttcaaatgttagccccttttctaggttcccctctgaaaatcccctatcccctcccactccccctgctcaccaatccacccactcctgcttcctggccatggcatttccctatactggagcataaaaccctcatagagcaagggcctctcttcccattgatgaccgactgggccatcctctgctacatattcagctagagccatgagtcctacaatgtgttttctttgattggtggtttagtcccagggagctctggggggggtactggttagttcatattgttccttctatggggctgtaaaccccttcagctccttgggtactttctctagcttctttattgggggaccctgtgcttcgtccagtggatgactgtgagcattcacttctgtatttgtcaggcactagcagagtctctcaggagacatctatatcaggctcctgtcagcaagctcttgctggcatctgcaatagggtctgggtttggtggttgtttatgggatagatccccaggtggggcagtctctggatggtccttccttcagcctctgctcctaactttgcctctgtgacttcttccatgggtattttgttcccccttctaagaaggactgaagtattcatactttgatcttccttcttcttgagtttcgtgtgttttgcaaattgtatcttgggtattctgagcttttgggctaatatccacttatcagtgagtgcatatcatgtgtgttcttttgtgattgggttacctcactcaggatgatatcctctagatccattaatttgtctaagaatttcataaatccatcaatagctgagtagtactccattgtgtaaatgtaccacattttctgtgtccattcctctgttgagggacatctgggttctttccagcttctggctaatataaataaggctgctatgaacatagtggagcatgtgtccttattacaagttggagcatcttctgggtatatgcccaggagtggttagtccctgattttagtgggattatttcaagtttctcttcatttagtttgatgttggctactggttttctgttattgcttttattatgtttaggtatgggccttgaattcctgatctttccaagacttttatcatgaaggggtgttagactttgtcaaatgctttctcatcatctaatgagatgatcaagtgttttttgtgtttgagtttgtttttatagtggattacattgatggatttccatatgttgaattatccctgcatccctgggatgaagcctacctgatcatgacggatgattgttttgatgtgttcttggatttggtttacaagaattttattgagtatttttgcatccacattcataagggaaattggtctgaagttctctttctttgttgggtctttgtgtggtttaggtatcagagcaattgtggcttcatagagcgaattgggtagagtaccgtctgtttctattttgtggactagtttgaggagtagtggaattaggtcttctttgaaggtctgatagaactctgcactaaacccatttgctcctgagcattttttggttgggacactactaatgactgtttctatttctttaggagatatgggactgtttagattgtcaatctgatcctgatttaactttggtacctggtatctgtctagaaaattgtccgtttcatccatgatttccagttttgttgagtataggcttttgtagtaggatctgatggttttttggatttcctcagattctgttgttatgtctcccttttcatttctgattttgttaattaggatactgtccctgtgccctctagtgagtctggctaaggatttatctatcttgttgattttctcaaagacccagctcctggtttggttgattatttgtatagttctttttgtttccacttggtttatttcagccctgagtttgattattccctgccgtctattcctcttgggcatatttgcttcctttgttctagagcttttatgtgtgctgtcaggctgctagtgtatgttctgtctagtttctttttggaggcacttagagctataagttttcctcttaggactgctttcattgtgttccataagtttgggtatgttgtggcttgattttcattaaactctaaaaagtccttaatttctttctttatttcttccttgaccaagttgtcattgaatacagtgttgttcagctttcatgtgtatgtgggctttctattatttatgttgttactgaagatcagccttagtccgtggagaactactggacttgatgggctatttcaacataatgagatgtgtcagaactgcagcatttggaagtatttgaaaagggcagtggagctcagtgaggggcagtgggtgctcgaacctggcagtgttttagttcgtagttgagtcttgcgcgcgccggactggccagcagtaacaacgctgcaacaggatccttctgcacacgtttattgggagagcttgattgcagaggcgaagagacctggagcccagaactggtgctgcttatataggcctaggagaggcgtgtctcacacccggattggttatgcactacgcctcatttgcatgttcctcatttgattggctactctctctctctctgtacctcacagagcctcattatcatacctcatttgcatgtctcacatctgattggttatactctcaaagcctcatgcccaggccaggcagtgtctttgcaaaaaactttactgcatatgtacacattggttgtttgtccaaacttatgcgtggtggccagcagtagtcagtgccactctgcaacggcatatgtggcttcccacaattgagaacagatgggttttggagaagcaagtgagaagaaaggcatactgtgagcaggcatgcagagtttggagtggcagctatcagttccaagggctcaaagaggctggcatgcaactctatgaatctgttttgggcagaaggagggccgggctccatgggacaaggcaatggaaagcctggatgtgcagcgatgttctcaggccgcagagagacttttgtatacagctgtagccatggcatctagctccactactagatggctagagggtggtggggactctggccagaggctgtagacagaagggaagtataagaacatcactatgagtgttcaaggagggaagaagagaggcaagatagctccagaatgtctggcttagtggctagtaatagagggggcataactcacattccagttaaccaccagtctgcccttttgaatgttttcctctcttttccattgagacgttctcttcccctcaaaggcatgaagatctgctaatgaaaccaggacttactctgttatcgtcacagtcctgcccagagcagtagcacgcacacaaacatagaacgattggtctttggaaagtcaacgaaaacaagcaaaacctcttgaagccttgcgacttcccctcacccacatttgattctatggttagcagtgacacaacaactatctccaccgcctgtcagaagtggaccttcccctgcttgttattgccaggaagtggctaaagttcatggactcaattatttgaatccgtgaactcaaactggctcttagcttcccttttgcatttacattgaaaacagtccctgcgtttgcacttatgatcagtgtttgctgtttaaatagtgcttttattagtgttatctcatttgaacctttattgaaaaccctcgggaagcaagctgaggaatgattgtcattgcttagtggaagggcaagctgagattgagaagcaatgtgttcatttatacaaccatgaaaggggctttcacacccaacagaaaaaggaaccatctgatgacttgacatgaatatattagaaactaatattagatacagagaccaacacacttaacatgtatatgttttctttctctgtgtatgtatgtatagtgtaggaagaaaataaaaatacttacaatagattccttctgtctgctataaagttcagaattatcaaaatgggacagactaccagggacatggtataggaattaagaacataaaccctgagactgtacgatgctcacctcttaaacccaaccagaatgcgatgaacaagccaagccaccatgcagtagccacttgtaggcactctgctctgcactctagttaaaacctccatgagcaaccagtaccacccacaaggcagacatacgaatgcagaagcctccagacaatttcagtggagtagaaatgaaatgtcctgccaaacctgcctgaatctaggcttcatccacaacacaaatataatcttaagtttgaggcatctctgcagaagtggaactcagtgctcacgtggtcttctactaatggacctgagtccagcagaggttgttagttgtaggaagacagttgagagggttaagctgatgagagagtataagtcaatataagttcagtatataagtaaaagatgaaagagggtttgggggcacagggataaggatcacctttccttccacccctctccctcagcctatagtgtgatttacaatgccccttgctgctgctcccaagacaatttcaacacctaggacagaaatagagaatacttcccagagtgaaatcaaacaggtcagaggcctctctggacacactcaagccagttcaagctttccggtttccactggacctacactaggggctgtgcagcagaatcgtgaccaggggaagactcttgtttgaagggctccagctgcttctgccttgttgtctggagtagctcatctcagatgacagtaatatccaaccctacttcctgagggcaatactgatgctattcactcagttcagaagttatattctgcatttgcttggccttagattacaaagacaacatgaaggcacaaatgtgacattagtttggacagtcatgatgatagggatcctaagtgggaaaatcagctgttaggctatggaacggagccagagtgctctgaaaggggaaagaacacactgcaagactgtggcttgatttaccttttaatatagaatatggcatcacggctgtggatgaagtctaaaagtcttacttgcaatgtgcataccaagggcttctttctagaagccaggctcttctgcttctcctaaggccagtaatttgcaaataagatgggtggatatatccttgaactggggatagtgggattcaaagatcaccagtctatcatctgtcttctgcctttggggagggataagctggaatcatcccgtatgcattgaatgtctcctatacaaccagttcatcactatcaagaagatatttgtatacagtttttatactcccaaattgggaatcttttttttttatccctttgaggagtctaggtcatggtgtgaacttacctgatatataagttataagcaggatgcttatattgtatacacctggtaagattcattcacctgtggcctgggagatagccaaagcattataatttgaatcgtttggaatctaaggaagtttaacccatgactttactttaaagatgcatacacaactccgtgccatattgcattaggcagtgcccatgcccatttccttaatgagttgttttgtccttttccttctaggtccttggatgtggctctattgctcaagcagtcctcagtcgagaaaaggctggtgggatcatcactatcaatattggatttgcaacggcagttgtgatggctctttatgcgacttttggtgtctctggtatgcagcagaactccttatcacaactactaacagtcctaatgtgctggcagtgttggtcactctacatgttttctttattagagctcaacaatgttgcaagaatatgtattgatctccttttcgtagatggtaaagttgaaataccaacacatggctagtggcttctgcaaaggcagggttagcactcacacctgagccctccctggcagctgcagtgtattgtccagaaatcagtactttttattttatgaatctcatgcttggaagccattatcccagataagcttgtgaatagctaagcaaaggtcatggcagcagaggcatgtccctggacctttatcagctacaatcagagaagctaggtcttgtgcaaggtcagcctggtcttcacgacagtgtgcatctgagctagaaaacattaacttagctcttctcggatggccaggttgataatgaccacctgcagggttttgcaaagcaaaatgctgggatgctgttgaatgtggtctgaaaacttagaaagagatcgggagcagtactgagtgttttgagtcatggagattcccacgtgggtaccaagcactaaagcaaaactgatcagaagaggacaccttggcatggtaggcactgtgccaggcctgggacatccttagtcaccccttctcccttagaataacgttctgttggaatgtgctactatcttcatatcatacagagagggtccttaaattgctataagtcctgaatttggcaaagagacagagcaaaattgaccctcagtgttctactaggggcaaaattactctgggcaaaaaaaaaaaaaaaaaggatccttaaggtaagctggctggccttgtgataaatatgccacagggatgctgaagagcgatgcccagactccctgtagctttgtggggtgtgtcgctgcaaatgatccttgactgggtgacaacatttccacaattataggaagatagccagagttctgtgtttgtgatgtgtttggcatgagcagtgtctccagtcaagttgccaggcttttgctgtgactccagcatcaaaccactcaccctaaggaaagcacaagatttgctgggtatttttctctgttcatgctaaagctaggttagtatggggaccatgacaccagacatgaactacactcttgaagtaagtagtcaagatgttccattactatccccacaccttctagcacattcgatcgagtaagtatagtctccacacatccattatgaatataggaacattttcagtctttttttttttaagatagagacagggtttatagcattggttctcagccttcttaatgctgcaatcatttaattcagttcctcatgttgtgatgaaccccaaccataagatcttcattgctgcttcatagctataattttgtcactgttctgaatcataacataaagatctgatatgcaagatatctgatatgtaacctgcgtggaaaggtctttcaaccccaagaggggttgagacccactggtttcaaaccactggtttggaggattttgcctgcatgataccctgaactgaacaatgacatgtagccatgtgggacttggaatctgtcagtgtagttgacccctgtcactgcagctcatggctctttgcatccattgttatatttggggacttgaagaagtcattgtcagggaaagagttggaagggccagcaggaaggataagggagtaggaagatggcaaagacctgtcccgtctggcctgtgtactgaggctaagtccttgggagtgagaatcagagaggctttgggtctgacccaactgtttatgagaggctatgagagttgccaaaacacaagtaaaatggtgagtgagcccagctcaggatatggtagtgtaaagttggagtggaggcacctgcctctgtttggaactagcatagttcatgctctgagggtccataacttgggcatgttcaggacagtgcatgcactctccatgacagctacacagaccacagcatcagtggccttggggaccagagaagaccattgtgtgagaggtgtctgtcaaggtggctgtacctaacaggctctgtagccacatgggaagccctatttgaagactcacgaacaaccagtgcatgctggacgtgaatataaatgtgatcccattgtgcggtcacaggctgctggagtcagtggcctttcccttttaatcaaatatttgctataaaggagttttagcattctgctccattgtgattatgctaaccaaccaatcagagcttaccacacctaactatgtagcatgctactgcctgttggttaactattttttaaaagttgtgtgtgtgtgcgcgcgtgcatgcgtacatatgtcatggaatgcatgtggaggcccaaggttctctccttttaccatatgggtcttagggacttgaacttgggttagtgaggttggtggcaagtgactttaccttaccctcttaggcatttcagtggatcacgttggtaactacttttgatgttgcattatttataaatgaattaattgaaaaagaatagcctgttcaaagacagggtaaacataagacatctatcacagaattgtgcaggaatgatgagaaggagtttgcctagaacagaatcttaaaacaattcacttagctcccccaggatccacactgtgggcctgttggactccagttgttctcctgggggcagggtctttatgtggatagtacgatcatcaaagcaaccttggctgagccgatatttgagggcaggactctgtgcccctgctgctcgtgttctttccactacactgctctggccttggccttgcagtaagcctctcaggtctggagggaagaagttctatcacccgtctggactccagccactgctcctcctccatttctgacccccctgtcacccctgtcgccccttcttctcactagttttcaaggcttcctcctagatctaccctctctgactcccaagcaactgcagattccctagacttctgtcatctgagtcatctaaacaaagacccttaaagccccatgataatttcattggctttttttttttaaatctaagatgcttaccaagtggctgacattgcatgagacctgaggttaattaggctttcagggtgcttgccagagattgcacggtgtaaacctacctgtaggaagttttattttagaagagagcttgttctagaagcctcacctgtcaaggcactcctgagggatggttttgatcagaggtgactttttaagtatctcttgtccttccatagtgagtgtctccaggctgtctgccttagatcataggttctgccccggtagagaggaacaaccatgccctttgtcctgcctggtacctctactcatcttctatgctcagagattcaactcctctaagctcagagactcctccaggctcagaccctactcccctctgaagtctagacatggaaggtttcatttggtctgtaggctgctgttggatcctctgtcccatcttcccttgctcaccctgtggtaactaaaggactgtccatgcagccatgggaagaaaaggaacagaggcagcctagttccaggaatttcccatcagcccctgtgtttgtccatattcatatttccaaccttcctactaagctggcttctggaacccataaaagcaagaccccacagatgaagtacttgtaaggatccagggggttattcatgctttgatattttggaattttcttgctcatgttcgctggagttgaatggctacctttgtggcttagcagccaaaacccattgtcaaccttgggctgaagattcaggaaaagcatggctctctctaagggttaagaattatcatcttgctcatcgtcaccattgccatcaggagctgtcatctctcttgttcacatctaacctgagcatccacctttcaatgtgctcactttgaaaatgaatttgatcccccttccacatgaaatgctatccatgttcttcaagttcatcttatgcatccctatcaatttgctataaaggatttttagcatcctgctccattgtgtatgtgccaaccaaccaatcagagcttaccacacctaattatgtagcatgctactcaaagtatgtagctgcctggtgttaactatttttttaaagttgtgtgtgtgtgtgtgtacccccaccatatgcataaatgtacacacgcttaattatcaaggcagatacatcttgcttttagatttatttttaagtatgtatgtgaggagaaggggaggatgtgtgtgtgaatgcacgtgtatgcagagtccagaacagggcactggatatattgcagctggagtttcagatgttttgagctaccgacccggtagctcctctgcaatatgagttcccaaccactgagataactctccagccccaaggcagagaaatctttataaacctgctgaaggatgtttagaagtaaattaatggaacttggcttttaaattcagatgaagttggacttagattttggttccatccctcagtgactggagaaggctcatatttctcagtttgctcactcagttaaacaagggcagagtccattccattgggttcttaagtctaaataataccactgtgacagtatctggcaagtcactcagtaaatattgcagctgagtccaaagccacgtgggaacatcggtggcactgcacagagcaaaccttctctctgaccttacgggtagccgagaatcaggaagctgctttcgctacctatggcttgggttgtgttaaaggagctgttgtcacatgtctgcatgggaaaacacattgtttatgcagagggacctagaaggatccattccaatatggcaggcacctctgacaaagcccttctgcctctgggacaggcatagggactccaccaggacggcattccttcccagtgctaagaatggctttccagcctctgggcatgcgccttctctatttgttagatatgtatttaaacctcaaccgccttaccatatatttacagtaatagtttacaacaatctcctggaggtattctgtaactgatggctgaagtgccactttaacaaaaacgagctgcttactcacaccaagtgtttaaaggcctgagttccttttcatacagaaaactgttctaaacggtgaataagggtgccacagatgattaggtctccctcgcccagcaccctccagggtctctgtttccctctccccactctcactttctgacctcccagcttgactgtctcatcttccttgcagggggccacatcaacccagcggtgtcttttgcaatgtgcacctttggaaggatggagtggttcaagttccccttttatgtgggagctcagcttttgggagcctttgtcggggctgcaactgtctttggcatttactatggtgagtactgaacctgagtccaaagatttggggggctggcggggcatcctgggaaagcctgaattcttggtaggaagcagggaggcatcgagaacagggaacattgtgacaacgtgacaatgtggccgagttatcaactgggctcaatttttttttttaatctgaagatgttcatgtatgctagtttttgtttgtttgtttgttttttgctttttaacttgtgtatatgtctatgcatcactgtgagtctgctgctcaccgaggccagaaaaaagcatcatattccctggaactggagttacagaccactgtgggatccataccatgagggtgtgggacccaaactcagatcctctctggaagaacaactatagttcttaactgctaagcgacctttctagacgacaagtatgaatcttaaggagggatggcacaacttttaagagcctaatttcaggcccaccctgcactgcagtatgaacacaggcaatgtgccagttgcctttctcctgctttctctgacttaatgagaaaagttctgcccaaagttctgcccagttgtgaaagctgtggccctgtaaatatttagagtaggagtcggagaacatgcctttgaagaagcacagccagtgacagacaggtcgggggcagcctctgccccttttagccaggcgcatctactcaggagccctcaggaaagtgtgctcccggcaatcacagacctaggactgagctatgaccaagacagatactagctttgtgacttaaatacatcactttggaatgaagcaacatggcacatgcccgtaatcctagcacctaagtggttgaggaaggatggacgaccaggcaatcaaggtcattctcagctagaaagcaaattccaggccagcctgagtgattggaaacctggtctcggaataaacaataagtaagtaagtaaataaggcaccagaccacgtaggtctcagtctccttctctggaaaatgagggactcccaaagtgcgcaaggctcagggacctcagtattccccagcaccaactattaaaatagttctttgcacacaacccaagatgagcctcggaacattctgagtggccaaccgaagacatcgataatccaaaccctagggaaacaggttggacaaaggggcttctttccagtgtctctctgagaattatatgtctaagggagactcgatgttggaccagaaactcagagagccagcagctcaacaaagagaagcctaggtgggtgccacctggatcagtggctgctggttccctgcttctggggggctctacagaccatccatagtatctttgttatccgggtgcactgtcaaattctgatgtaaacttttaggagcaacgaagaggaccctagaagctgtgacttccacttagcacaggataaagtcacactttggttttagatccatctaaaaactccgagaattccccacacgcacccacccaaagaagattggtttccaggagcctataagaattccatacaagttgagatgaaagcaccgggccaaccatgggctttctgcttctacttcatcatcctggggtcgtcctggggggctctctgaggctatctcaccataaagattgcttggcttctattgatttgctcaagaccaagcatgggtctctgttcccctttgatttctgctgctgtgatagaggagagtgcacagcccctcaccctattcaaagtcaaagcaggagctcaaagcaagaacttgaaacagaaaatatggagggacagtgcttgctggcttgctcacaggctcatctatagaaatttttcttatacagtctagaatgaacacctggaagaatggtaccactctccagtggtatggaccctcccccatcaattaataagcaagacaattccctcacagatatgtccacaggccagtttgatctggtggtctcccagttgagattcccctctcaggtttaccctacctaggtgatgccatgttggcagttaaagctgactcggacatcatccttcagccctttccagaaaacactaatgtccccgagctctgtcttctatagacggactcatggcctttgctgatggaaagctgctcatcacgggagaaaatggaacggcgttcattttcgcgacatacccaaaaccatttgtatccgtgccaggtgcctttgtagaccaagtaagtgaaggaaggacctgattttggtggaaagacatgatagaaagtggggatggggaatcgggcgtggacgggaatagggtgtgtactggagccctgaatgccggtcagaagggaaggattgcatcccccagtcagaggtgtctctgtgaactgagctttcttggcagtggtttgcccttgaagatgctgatgccactaaaaggggcctcagcttcctgtttaacgcacatagctgcttcataccagctaaggtccagacaaagactggctgcctggactagaaatatggccgtgagcctggagcggggggcagggggcagagggcagggggcgggggacggggggcgggagaggggcaggggcgtcaagaatctgccctgtctctccataagccctaacttctcctgactctcaaggggtctaagtgtcttgactagattgaactttgaagaagcgtggtgtggtggctgcacactcataatcccagcctttggaggggcagaggcaggaatatcaccacaagtttcaggtcagcctggtctatatagaaagttccagggcaatcagggctacactacactgagagaccttgctgtattggttggtttgtgaaaacacacacacatacatgcgcgcgcgcgcgcgctcgcgcacacacacacacacacacacacacacatcaccattttcttttcttttcctttctcttcttttctttttattatttgtttgtttgtttgtttgttaatgtgagtgcactgtagctgttactgacggttgtaagtcatcatgtggttgctgggaatgaaggttgctcactcaggccagcccactcactctggattaaagatttatttattataagtacactgtagctgtcttcagacacaccagaagagggcgacagatctcattactggtggttgtgagccgcatgtggttgctgggatttgaacttaggacccttcagaagaacagtcagtgctcttaatcactgagccatctctccagccccactcaccattttcttttccactttgattacaatataaatcaggacacaaacatttactgatctttccctggataatcagccccatgtcaggagcttgaagaatttgttactactgcacgtaggctgcaagtcccaagacccagagcccgagtccttgaactgaagtaacatcccgtctctgactctttgagtggtttcagcatgttgctgaacttaaaaaaaaaaaaaaaaaaaaaaaagaagtttctgacttcggggctggagagatggctcaatggataaaagcactggccgctctccacagaacacttgcatggtggctcataaccatctgagccatctccagtttcagatgatctgatgccctcttctggactccacaggtactacattcatgtggtacatccatgtaggcacctgtgcacacaaaataaatatatatttgcccatttcacttggataaataccacatggataaatatcagcctttgccaggtttattgtaagagttaaaaataacaatatgagaaatatgtgttgtgagcagtgtctgtgaagaaatgtagaatgtagctgaacagagtgtcgtctatggaacaaagtgacagccagacaaggtgtatccgtgcatgcctgtaattccagccccctcctaaggaattaaaaaaaaagaacaatgtaaacaactaagagtaaaacaaggctatagcatcacactagtgacatgcagggagcccacatgtcctgggactgtagaaagagtgttagtgggaaagacagagcgacaaagttgcctgaagaaagaatgttgtcactatgtgcgatagtatatgggtggtaggcaatgaagtgactgagtctgagattccctttccaagtgtcacacatcttggggcacgcttctttctgtgaagggaagccaaagttgtctatattacacatgcagtgagggaagccagagaccctgggcctctggtttggggatagtgtagtgggggagagaatgagggaatcaatccttcaaggagctcatgagctatcaagtggaaaagcagaaccagtgtgatgagcacagccaccccctcccccatgccctgcagagagacttgatggaccggcaaatgcttgttactcttgaagacatacgtttgactgggctccaactcagaaatagaagctctaggaagaccaaagtgtggatacttcaacccttcttagaaaggggaacaaaataaccatggaaggagttacagagacaaagttcagagcagagactgaaggaaggaccatccagagactgccccacctggggatccatcccataaacaaccaccaaacccagacactattgcagatgccaacaagagcttgctgacaggagcctgatagagccgtctcctgaaaggctctgccaagtgcctgactaatacagaagtgaatgctcacagtcatccattagacagagcacaaggtccccaatgaaggagctagagaaagtaccctaggagctgaaggggtttgcagccccataggaggaacaacaatatgaactaaccagtacccccagagctccctgggattaaaccaccaaccaaagaaaacacatggtggggactcatggctccagctgcatatgtagcagaggatgttctagtcggtcatcaatgggaggagaggctcttggtcctctgaaggttctatgacccagtgtaggagaatgccagggccaggaagcaggagtcggtgggaggggataggggattttcaaaggggaaacttggaaaggggataacatttgaaatgtaaatagagaaaatatctaataaggagagagagaaagagagagagagagagggagagagagagagagagagagagagagagagaatatcagtagaagttctcagtgaggccagcctgcatctcttggcaatccattcctggtgctctatggatgtctccactctctcggtcaaacctttggcacactgcatcctcctctttagcttttacatccatgtgtgtgctgcaggatgcacacagagtaataggatgctgaatcttgggtgctttggtcccaggcttcttcccttctttgtttaagggctttctgacaacatattggtgggcaccatcttcctaagagaaattgaaaagctttcagattcttctagctctttcaggatctagcagtcaaggtacagtagtatctgtcagtccagggacattcttatctcctttttttttcattttttcacaataaacatcttgacgacactccatctggtacccacaatgcaccctgaacagactcgtgcttcctctccagttctccttggtctgtaacaagaatgcccgtaactcaacagtaggtaccctctgctacaggtcaagacacctttacctcgtggggaaatcttattatccctaccactgcttcagagcacacatcccttcccctccccactcagagcatcagcagcaacttttgaggccatgtcctcctcactgaaaatgcaaagtttgcgttcatcataaaacttcaatgagtttgctgccgggaatgagataattcgccttcgtcttaacagagcccatggcctaggcgcatcacacacataaaagggagctccagaattttgtctgcaatacgaggggttgagaacaggccttgaaaggcaggctttccatcaatgagctccaaagaatgaagatgtatcaatgcacggccaagtctacaggtgagcaaagtcgtaattctgccaagtcacatctcataaaaagactttacgaaatttggctcacactaagtaaagaccttgtctcctgaggacagcagccactggaagcagtttctggaggacaggctggtagtctctaggaggtaggctataggagctgtggggatgagaaaccctggaggatgggcagcttggaacagattacctctcagaatccttccatccctgagcccagatgagctaacctggaaacagaagtttgacactagggggagctgtagccctgtgaagagaagggagttgaggagggaggggcctttgcaacagcatcatgcaaataggtatgaggagagatgacagagtacattactgaagacacactgtggtccgggtttggggtcctcagatctctgatatcagcaactacagagaatgagatggagaaaattaatctttctagcttcaaagcactgggtcttttactgcagccccaccaggacgcctatggctgcgggaactgttgagcaaacctcacccacaaaaccctgaaacaactagccggtgtaccagctagatgaacaaggcaactggagtaccttggagtagactttggggatggataaacttgcagggtttcttgacgatggcttgccattccatccagccaaatgtatcttctaacaaagatcaaaatcaagcagaactctcaaaggacatcaagagagctcgcctgtgaaggtggcgccatccctcttcgagcgagagggaggaatgctgactgctcagtcctgggcttgcactggaactgtcttcccccgtccttgttctttccatccagtgtcttgttcccccagccattctgagagcctgaagaaggaagcggagcccctggccccgtgaactttgccacaattcatccctctccagtgagtcctgtagtgacactcttctgcttctcacagactcgtcccatctcccttccattcctggctgctcactggtcccagaagcatccctgacacacagcaccacaaaggcaaaatagcagcataaatctctttagcaatcctgcattgttctagagagagagccctgctgctgatcacctgtctgtccttgcgcaagtgaactcagagcttcttaaggcctcagcttagccttctggtaaatggcacaaataatacccgatggcccatggtaatgccccatatttaccagggaaccaacaacagcaatgtctctacctaggccatctctccttccctttctcttctgtcctgatggaatcttataaagtgtcacatattctcctgattcctagccttaggacgttttgtcacgtgccttagagaatcacttgggatctggacggcagagagctgccttcatcagaactttcttcactgtgtccttatcgcagagtaatgtgccatttcccccaggaattattgcttttaagcagttactgtacacagctaggtagagagaataaacgttagaaatccccattactctaaccattagccagtgcctgaaggctctctgccttcctgcgtctttagaaagtccaggaaaatgccaacatacagtcggtcagcacccaagagagctgctggctgctccaactgtgccttggagcgctttatttcagtggtgttagttgttgcgctctgacaacatgcaagcattgtttccctgttagttcatctagctaacacacatttgttagatacctgcgcctccagcatgttcttcaacatccagatcaggtattccactggcgagtgaacaggtggttcgaggtgacaagggcagagataataaatcaagttgaggcacaaggacaaccaaaggttccactctgccacggaagatcaggaaaggcaccgcagacactggagctctctggagacctttcaaaatacaaattcttgctgtgtggtggtggctcacacctttaatcccagcactagggaagtaaaagcagttggatctatgagtttgaggctagcctgtctacagagcaagttccaggacagcttgggctacacagaggaacctgtctcaaggaaaaaaatatttgaaacaccaaagagattaaactataaattcacctgcctcgtgccatcctgactggctccttgtgccatcctgactcttcttcatgccctgagcacatggctcaacctctgtttacctaagtttacccatctgtaaggagcacagcagggcttaccacaccaagatcattacagcagttccgtgagatgaagcacacagaccacaagtgaggtggacatgctatgcaccttagaaaggtgtcacactctgtgtgaaggacannnnnnnnnnnnnnnnnnnnggaagtaaaagcagttggatctatgagtttgaggctagcctgtctacagagcaagttccaggacagcttgggctacacagaggaacctgtctcaaggaaaaaaatatttgaaacaccaaagagattaaactataaattcacctgcctcgtgccatcctgactggctccttgtgccatcctgactcttcttcatgccctgagcacgtggctcaacctctgtttacctaagtttacccatctgtaaggagcacagcagggcttaccaagcaagatcattacaacagttccgtgagatgaagcacacagaccacaagtgaggtggacatgctatgcaccttagaaaggtgtcacactctgtgtgaaggacattatgtatacagcacccctccgctgtcacctaggtggcagagcagtggttggttagaaagtttagaaagtgagagagcaggaaaacaccaccacttccgagtacctttaatgtttatgttgacagttctatttttttagttttacatgtatttggtgtatatgtgaatacctgtgcatgtatgtgtgtcacagcatgcatgcagagggcagagaacacattttttggtagttggtgctctccttcaaccatgcgggttcagggggtttaggggtcaggcttggcagcaagcgcctttatccaccgggccagcctactggtgctgtttagagattttagtgtcactgcagtaagctgtgggatagacaacatgggatgcagtcatctttctcatgactgatgtttgcttaaatgaattccagtttccagcatgacaagccacatatacattttaattatttaaaaataattttccggggctggtgagatggctcagtgggttagagcacccgactgctcttccgaaggtccagagttcaaatcccagcaaccacatggtggctcacaaccatccttaacaagatctgactccctcttctggagtgtctgaagacagctacagtgtacttacatataataaataaataaatctttaaaaaaaaataattttccgtagtttagattacttctgtggaatgagtctgacctgttgaattgtatgcatgaacttgggtaagttaccacggggttacctttcggggacatggcacgtgttaggcttcattagaagtttcccatgaagaaacttccgtccacctactttgcttgttcctctgttgctttccagcgtgctgtctaaaccagccttccttcactttcttatcgtgtcccttgtccctcagtgttgctgactagcagcttagcagacagtatagtagttgaggaccagtctcaaagctgcaatggacgatcctgtcagtgtctgcttctagcgtgtttacggaaggaagagccacgcacctgtccactccgttagttgtcactagtttcactttttttttttttttttttttttttggtttttcgagacagggtttctttgtatagccctggctgtcttggaactcactttgtagaccaggctggcctcgaactcagagatccgcctgcctctgcctcccaagtgctgggatcaaaggcgtgcgccaccacgcccagccacttttttttttttttaaggtttatttattttaggtggatgagtctgtgtagcacatgcttgcaatgcttgtggaggccagaagagggcgtcagatccctgggaactgaagttacagatggttgtgaactgccgtatgggtactgagaactgagcccaggtcctctgcaagagcagccagtgctcttaactgttgtgttggctctgggtttcagacccctgccatttttatctcttaacagaatgggtgactttgagtgtgtagaacacagactgaactctggaatgtttcctccctctccaggtggtgtctaccatgttcctccttctgattgtctttgccatctttgactccagaaacctgggggtccccagaggcctggagcccattgtcattggcctcctaatcattgtcatttcctgttctctcggactcaactctggttgtgccatgaaccctgctcgagacctcagccccaggctcttcactgctctggcaggatggggatttgaggtcttcacgtaagtaccaatggtagggaggagagaaaaggatgggtcctgtgcttcagcagagaggactgagccatgacttggagatgtaggagcttgtggacccagaaagcagagactatgtacacgctggttaaatgtgaaccattttttttaaagatttatttattacatgtaagtacactgtagctgtcttcagacacaccagaagagggcatcagatctcgttacagatggttgctgggatttgaactctggaccttcggaagagcagtcaggtgctcttacccactgagccatctcaccagccccagtgaaccatttttattatataagttggctacagattgacgttgtgaccaagtcaaatctagaatcaacatcttctgatgttgcctaaggacccctgagtccttcattctcttaccagagttttattgggcactagatatgcagagtcactgtgacggagaaggacatttccaaatcagccggcataccaggatttggggcagaagtttggtgtgtttacgaggccaactagtcaaaattaacccggcataccatacaagatgaattgaaataggagagatttgaaggataaaatccatgcccaaaggcatagctgtatgtgcctgtaattccagccctgggatatccagagagcttgctggcctttagtcagccagcctagctgaaagggcactaggcgaaataaagcagagaataatatagggagagtacagggacacctaacatgggctccagacatacatgcacttgtattcataccctcacttgtgtatacacacacatagacacacagacacaaacacacacacacagacacagacacagacacacacaaacacacacacacacacacacacacacacacacacacttatgtgcattcctggcagtcctaggaacatagtgtaaataacggctaccctgtgtgtgcgcacagagacagtgccctgcaggtaactcacatctgagtgcctccacttaggacttctgtgtctgtcatgctgtgcccagcttgagataaagcagacaggattccaccagtgacaggaagatttgtatcttactcagctgaggcgggagatattccaaaaaaaaaaagaaaccatggaacaacccaaaaaggctgctacagggatcgcattcttacttccagacaaggcttctggaaaaggtctctcaaactctgaggagaaagcagccatcctttgcccactgctcacagcagggtgcttctggatttggggtttgggaatggaggtaggggtggggtggggaaggaccctgaggcatcaggtcaagcaacctcttgcacaaagtaagagtgtcatctgatagccgcttcgctctcccatgtaacccacactggtgaccaaagacagggaccgtgtccctccctgcatgctcctagtgaatgaaggcactggagctcagacacctagtctgccccccaccccccgggtttgaggccagctcttctggaggccagggccgagctcttgctttctggtgatgtcctctgttgtcccctctgatcaaatcaaccagctatgaaggctgcaatccatcaaagtttgagggacgcctgagctacataatacgtcccaggccaccctggactgcagctatgaccctatctcaagcagacaaaaccgctctaaacgaaatggccacaagggacagtctgtggtaatcaagcacaatcatgcaaagaacaggcatggatccttctagaatcagcatgctctccgttatgttagccaggaaggtttttggtttcttatggctctgaggatcagaccctatgccttgtgcatgcggagcgagggctttcccactgagatgctctctgagtcttttcctgtgagttctcactaggatgccagaatctaggcagaactgtgctgtgtgaaatcttcaaaggcacctgtctgcaccccctgccagcctgcttttcctgtcctattctgaatgtctatcactctcctgagttttagaactagttttccctagccatgtatgtccttaaataatatattttatgtgctttgtttttcctaagtgatggtagaagtattaaataatatattttatgtactttgcttttcctaagtgatggtagaagtcgctcttgtggagtcgcttaaatagattttttttttctttaaaaaacaagcctcacaaggcaaccactgtcccctggaaccacatctttgctagcatgtgcagacattcgtggtggtggtggtggtggtggggggatcacctgaggatgttgatagttgtcactactagaaatggggaagagtgctaatggtcagagatgctgtcacagcaaggcagtatcaaactcatgtcagttatacccaggctgagagaccctggagtttgagaaggtgtggagagacaatcaggagaccctgagactcctgtgctactggattgtaagttctgtaaggaacagagannnnnnnnnnnnnnnnnnnnttcttcatgccctgagcacatggctcaacctctgtttacctaagtttacccatctgtaaggagcacagcagggcttaccacaccaagatcattacagcagttccgtgagatgaagcacacagaccacaagtgaggtggacatgctatgcaccttagaaaggtgtcacactctgtgtgaaggacattatgtatacagcaccccttcgctgtcacctaggtggcagagcagtggttggttagaaagtttagaaagtgagagagcaggaaaacaccaccacttccgagtacctttaatgtttatgttgacagttctatttttttagttttacatgtatttggtgtatatgtgaatacctgtgcatgtatgtgtgccacagcacccatgcagagggcagagaacacatttttggtagttggtgctctccttcaaccatgcgggttcagggggttgatttaggggtcaggcttgacagcaagcgcctttatccaccgggccagcctactggtgctgtttagagattttagtgtcactgcagcaagctgtgggatagacatcatgggatgcagtcatctttctcaagactgatgtttgcttaaatgaattccagtttccagcatgacaagccacatatacattttaattatttaaaaataattttccgtagtttagattacttctgtgggatgagtctgacctgttgaattgtatgcatgaacttgggtaagttaccacggggttacctttcggggacatggcacgtgttaggcttcattagaagtttcccatgaagaaacttccgtccacctactttgcttgttcctctgttgctttccagcgtgctgtctaaaccagccttccttcacgttcttatcgtgtcccttgtccctcagtgttgctgactagcagcttagcagacagtatagtagttgaggaccagtctcaaagctgcaatggacgatcctgtcagtgtctgcttctagcgtgtttatagaaggaagagccacgcacctgtccactccgttagttgtcactagtttcacttttttttttttttttttttggtttttcgagacagggtttctttgtatagccctggctgtcttggaactcactttgtagaccaggnnnnnnnnnnnnnnnnnnnntgatggtagaagtattaaataatatattttatgtactttgcttttccctaagtgatggtagaagtcgctcttgtggagtcgcttaaatagattttttttttctttaaaaaacaagcctcacaaggcaaccactgtcccctggaaccacatctttgctagcatgtgcagacattcgtggtggtggtggtggtggtggggggatcacctgaggatgttgatagttgtcactactagaaatggggaagagtgctaatggtcagagatgctgtcacagcaaggcagtatcaaactcatgtcagttatacccaggctgagagaccctggagtttgagaaggtgtggagagacaatcaggagaccctgagatcctgtgctctggattgtaagttctgtaaggaacagagatgtcaaacaagccagaatggactcttgggatgggatttaactctcagagcagaaggtaatttgaaattagttttgagggtggattgtggaatatatgacccaggcaggtgctcactagatatcattggatgattaatgaccaagattatgaagaggaagtgtacagtattggaactccacccccagagaaggatatcttgatggataaagccctgttgttctacactcaggtccactcctgtcccaggtctacagtgagcaggttgagctctgtagggttcttcttcaccaacagaatgtctatgaagctgcatggtctacatcagagccaagttcctcggagcatttaatgtcaaaaatggaatttttctgtgatttccccaaccattgaggtctcagagctcagttctacccagcaaatacctcagccaatatttagttgttggatgccgtttgttgtctgccaagagggcaaagcggagcccagatgaataggttccacagggcaagggtccaaccaggagtgctggaagcgttacagctctcaaaagagaagtgaagccttgcagagtgcacctgtgggctgtgccatgaaagctatgtgacggtctagcaatattcagtaggtaattaggagataattcacataccggtttaaacttccttccttcactatttggttgtgggaattaactccagagtcctgggaacttgttcacatattctgagtccccccccctttttttttcattcataacccccaagcttcatttttttcacagtataggaaagacagttactgaatagcctctctagagaccctcaaaccttggccacggattcatggaagcatatatatttttaatacaatacatttttctggagggggtgtataggacgtgtgtgggtatacacacacacaccactgtgcacatctgtggcagtcaaaagacagcttgcaagaagttggtcctctccttccaacaacacgagtcctggggatgggacacaggccatcggcttggcaggaagcaactttacccaccgaaccatctcatttgcccaagtgccatgttctctaaagggaaaataaataggatacaatcattccctggtgtcattaggacactggactgggtccctgttaccaggtatactgggaagtccaggacggtaatggccatgctaaggtgaataacaattatcaagttcaagagagggctggagagtgggctcagcagttaagagcactgactgctcttccagaggttctgagttcaattcccagcaaccacatagtggcttataaccatctgtaatgggatccaatgccctcttctagtgtgtctgaagacagctacactgaactcatatatatatagtaagagaggtatgaacacaagaaagacctagtgaataacaggatggtgatacaaaggtgaccaacaaatgtctcactggtctcttgtttgctttcagatttggaaataacttctggtggatacctgtcgtgggccctatgattggagctgtcctgggaggtctcatctatgttctttttatccaaatgcatcactcgaaccccgacccagaagtgaaggcagaaccagccgagaacaatctagaaaaacacgaactcagtgtcatcatgtagtggcatgaccaggtctagagttaccattcatcctgttctttcttcagaaaagatggcatctgtgtgcctgtgcagacttggggtggggacatctacccaaccctctctagctgactgggacaaaaataaatcccaaaggcatccatgaaaaactctaccagtcacccctccccagaacagcactaactgtttatgatgggtatttgatggaagaccgtactcctaggtgattgctaagattttggaaacttgaccatgtgctcggctggatggcctcagagacttttcttaccctgtatgaaactgtgtgatcaaaggtgaccaaaggttctgtttcacaatctataaatacattctaaagctgaaaggccaaacagtggatgcacttaacacctatgaagtggggagcaaagggttaacactctaccaagctgagcgctaccactaatacccatcttctcccaacctagggctggagaaagcagcagacagcagctggaagaaggcagtggcatttagaaacctcaggacatgagataaatttgggaaactgaatggctttctttttaatggaaaccatttgtcagattaatctcctgctcctctgcattttagatgacatcaattaatttccaggtctttaagtttataataacctaaaatacgattataaccttggccgggaaaaatacaccgctcggtcttttagcactagagtgagccattaggagagacctttttaataaatagttggtggctactctcatccatatccccagaagcccaaactaaaagctagtggactctacctggtggactaaagttggaggtagataaagtccctgggacaaaaggataaggtcgggctttaggacccctggttccacgcgccttatccagtttgatcccaacagcaattgtctgaggtgaatgaccacagcattcttctcaaatgagaaattcaggtgacctgagcaagttgccctttcttctgcagggggctttgagtgttgccttatgccttccagaagcttgctagccgactgagggtgtttgagctgagggcatcggcagcttccagacggtgtgggctttgtagaagcaccactccgggcctttgatttccatacgccatgtttactgtttttattcccagttttactgaggcacggatgaagggacaaggtagccgtttgataatgttcatttgtggagaaacagaggcctttcttccttagtggctctctgtctccgtccctgccagccctcctcagcctctcctggagacatttctctaactgatgttacttccaaccagagaaagaactgttctgtatcaggggtgtgccttcactgccaactgtttacaagcccggcgttcctcgataacagcaagtttccccaggtgctttgcaagactaacagaacaagacatgaatgagaaacatctgtgatatcctgcgctgtgcaacctatgggcatataaattcattttctgagtctgaaattacctggatattttctagtttaaataaatttggagggatattaattgtgtttaaagtatttatttttcctctttgacggctaccaaaacctaattagcagagagtttgtcagtactgtgtaggaattgaatattccatgggaattttagaaaatatttatgcccagctaaccctttgcaagtagctcagatgtctccagcatgcattaaggactggaaacagagtggattggacccaatgaacttaagttttccttgaaagccgtatatagttgtcacgatgggcttgttggtgtttttagtgtcatagttcctacgggattacagcatggttctcacctatggcaattttgatttcttctcccccttctcaaacatctggaaaccctgggagatgttgatagttgtcactactagaaatggggaaaagtgctaatggtcagagatgctgtcacagcaaggcagtatcaaactcatgtcagttatgcccagactgagagaccctggagtttgagaaggtgtggagagacaatcaggagaccctgagatcctgtgctctggattgaaagttctgtaaggaacagagatgtcaaacaagccagaatggactcttgggatgggatttaactctcagagcagaaggtaatttgaaattagttttgagggtggattgtggaatatatgacccaggcaggtgctcactagatatcattggatgattaatgaccaagattatgaagaggaagtgtacagtattggaattccacccccagagaaggatatcttgatggataaagccctgttgttctacactcaggtccactcctgtcccaggtctacagtgagcaggttgagttctgtagggttcttcaccaacagaatgtctatgaagctgcatggtctacatcagaaatcaggagcagagccaagttcctcggagcatttaacaccaaaaatgggatttttctgtgatttccccaaccactgaggtctcagagctcagttctatccagcaaatacctcagccaatatttagttgttggatgtcatttgttgtctgccaagagggcaaaacagagcccagatgaataggttccacagggtaagggtccaaccaggagtgctggaagtgttacagctcgcaaaagagaagtgaggagttttggacagcccatgcagggtaggtagccgaggtcccaatattgcagcagcagcagcagcagcatgagcatggccagccaggcgggtccaaagtgcagcaatgatgcacagggagacagaacttttccctaaaggaagagtttacagctcagtaaaacagccactctcagatggtccttggtgaaataactcgtataccctattccacactgaggaatggcagggatttaggggtaggtgtttcctattggctcagtctggatgttagtgatgctctatttgtatggggaaggactacagctgtttttccctgcttgactgactgccgtggtcctctcagtgggatgtcatggttaccatgttctggagcaggtacagaaatgggtagggagtggcttgacttctgcagatctcaagtctctgagattcctggggtctgagctcactcggccttaccagttcttcagtctggtggcccgcccaacttgccccacagtcggacaggataagtagagctaaaacattttttaatttaatccttaaggcatagattataatttaaattgctcatggcacggcatctcatcagggcaaagccagcagtgaagtcctaacaccgtttcctcagggagcctgggatgtatctgtctcagtctctttgggttgccaggatgaaacccctgacaaaaggtgcacttttgttctcggtctgagggttgccgtccatgatggtgatggaggcatagctgttgagtgtgagtcaacgggtcatgttgcatccacagtcaggaagcaggaaatggtgaatgcttatgctcaccttgcttttgccaagccgagcaatcatcctcctggaaagatgcccctcccattgagggtgggtcttcctacctcagcctgatcggaaaaccacctcacagctgtgtctcaggatttgtctctaagccctgccaagttgacagtatcaaccatcatacttgtagtgtgtgtagtgtgtgtgtgtgtgtgtgagtgtgtgtatgcatgtggtacgtgtgatgtgtgtgtggtgtggtgtgtgcagtatgtgtgtatgtgtgtggtgtatgtgatatgtgtggtgtgtatggtggggtgtgtgtgtgtatttgtacatgtgtgccatttctcatggaggtcaaaagagggtgacagactcctggacctggacttaaggcaactatgagccacctgatgtagatgctgagaaccaagctgtggtcttatctgctgacgtccctctccagccccaataatatcttcaacaattattgttacatcaagaaatccatatttcataaagtgcctaaaccttaaaggctgaagcatgccctgagtctatccctttgtgagacagcttattatgtaagcttattatggtgaaaacctagggactcccaagtcaccacagcttgctgcaagagcagctatttgatagtcacttatacgtttgttcccaggacgtcagatctttgcaaacaaagccagtacaaaagcagcatcccgcttccggcctaaatgtttggtgtaaaggaaagcagggcctttgctagccctcaattggccgactgctggtgatgttctgagaataagattctgatttacaaacaatatcatcacagccccaaatcagttctgtggatccggagagcagaggaccacaccagatccctcctgtaacctgttctcagtatgaagccaagggctgagtgagtgatcttcagataagacctcgagggtctctgagtgctcacatctggagactgtaaggactggcgcttaagaggtcaggcttgggaaaggctatctctggtggcctcactacatgagcctctaacctttctttatccactagatgggatgacgtcctacagggtattaaaaataccatggagcccttaaacactccctggagcttgttaccatcttagtgcctcctaattctattatttcacatttgcacactcagcttgttcttctgacatgtaagaatttgaagctccccctttccccacagaatcttcaagggtgtatgttgaagagtggctaacattacccacctcgcttacatggctgggtaaggtttgacaacctgctcagggctgtgcttcattcattacagagctcagcattgataagaaattaaccctgtgcttgcttacctaattatttagacattaaaaattggtttaaattgtagaaattgtttacagagttaatgtaatactagcaaaagattcgataggtattttttttaaggggttaaaggctgaaggctgtgtatatcgatgcagtaccagtcaggcctgatgtcagacactgcagagactgaaacaggacgatcacgagttcaaggtcatcctgggctgcagagtgagactgtatcccaagatgctactcgtgtagctattgatttttaatgagggagctaatggcaccctcctgagaaggtgaggtgctatcaccaaatgccattgatgagccacaaagagaggagcacacagaaacaaagcccacaaaatatggtgcaatatggatcatgggcctaaatacagaagttcaatctgtagagcatcgagaacaaaatacagtacggcgtgggttttggcaaagctctcacttaatgtaatactataaaaacagaactgctggactttgtaaagcataaagcatctaatcagtaaaagatattacagaaagaagtggaagtcagaggagagatggctcaggggttaacagcagcagaagacttgaactggattccctgccttcaaaatggcagctcgcaatcatctgtaactccagttccagggagtccaacacacccttccaatcttcccaggcattgtacactagaagaggacatatgtgtgtgcaagcaaaacataggggtgtgcgcatgcacacacacacacacacacacacacacacacacacacacacttagaataactacagctaagacaaacttgtttttcaaatggacaatggatttgacatctcattaaaataggtatttgaatattcagtatacatatcaaaggagttcacattaaacttggtactctatcctgtaatttgatcctgaaagactgtgtcaagaagtaagatgacttccttcaaaactcataggtaacatccaaaaggcaagatctggggcaatggtggcttataagccactgctaggagaggtgtccagtggtctaagtgagcttttaaaaatgtcttataaattgaaacatgggcctgctctgtgatctctaaattctactccaggggtccaggagggagtatattatctgcacataagcaatgttgtacaaaaatgttaatggcatctttattcgtcaaagctccaatgtggaccgagtccacatgtccatgaacaaaggagaggacatacagtttttgatgtatgttgataagaggagacttaataatagaaaataagatgctattaatatcacagcatgaaaaatattaaaacatgctgagcaaaatgaatcagacataagaagtgcattgtaattgaacttttatagcattcaagaacaataaagtattccccggtgacataaagtgccccatggtgacagaaatggcagcagttatttgtgtcagagatgggagggtgcattgtttatgatggggctcgggaaaatggaaatgttttgattgggttggagtttttaatggatgtgcacacatgtcaaaacttatcaaacctagtacttgaaatagattacatagaatatcttctaaatgatcaggttgccctctcatccagtactaggaattgctgggtgtgttgtctcacacctataaaaatctcagcagtgggaggcagaacaagagaatccaaagttcaagacaattctggactccccagcaggaccccaactcaagaaaaaagaggtcaatctatagagtgatagaaaaatataaccaacagcatgctttctagaggttacatgcagtcgattggaaaccacagataggctcagggtaaaaggacagatggcatgcaagcagtgtcaaaagaaaacggacatgttcacatttgtgtcagataaaataggtctttaaaaaatcaaaaaggcctttaaaaaacatggggataaggaaggacacgtgtgtgtacctaagaacacatgtgtatcctcaaaatacatgaaggaaaacatgacgacttaaggacagataaaaattcagtagtagtagttgaagacttaaatatttcatttataatatttttctttgagaattacgcacacaatacacatgcacacaaacacacatacatgcacatatacacagatatacacacatacacgtatcacatacacacacacacacgaacacacatacacacatacacacacacacccacgaacacacatacacacatgcacacacacaattatacacatatatacacacatgcacaaatacatgcacacacacatttttggatcatattcaccctccactcctccccattcccaatcccatgcccccttttgttctttataaggtactgagttcgatttgttctactcatatatgcagggatatggggccatccactggggcatggctgagctaccaaggaccctgcctttaaagaataaatatttcagttatggtaaataaaataattgcacagaaaatcaacaaggaaattcaagatatagagaactcaatgaacagaccatggcaacaaactccaaagccaacaacaacaggatacacatggtcttgaacacataactctaggcgagaccacataccggtcacaaaacaaggcacatcagtctgaatggtgactctgaccacagttcaaaagttcagcatagcatagcatcctccaattattcctatgcttacacgtgttatatacagatctttggcatcatagcataatggttgataaataactattcaaaaacccaaaagcaattcaaacactcatcagctgacagattcatacaacttgatgtctccacacaatggaatattactcagctgtaaaatgaatgacacatgggtatacatgcaatgtggataaccttaggagacatgggtatgagtgtgtacacgtatgcacatgtaaggaggtcagaggacagacagtgaaagtcagttttctccttccactatgtgagtcctggggattgaactcatgtccttaaatttggcagcaagcacctttgcccaccaagccatcttgctggcccaaatactaagttaagtgagaaaacaaggcagacaaacaaggtcacatgtagaatgactgtgcttacatggaatgttcagagtagacaactgacagagacaaaaagcagatgagtgagtggttgccagagcagaggcagggaaatgggagcccatgctgactgtacccgggagtgtggtagaggtaggtaccgctaccaccactctcctgtaagtaccctaagagacacagactacaccataaggagggaagttcattttttaaaagatttatttattcatttaatgtatgagtacactgttgctgtcttcagacacaccagaggagggcatgggatcccattgcagatggttgtgagccaccatgtggttgctgggaattgaactcaggacctctggaagagcaatcagtgctcttaaccgctgagccatctctccagtcccaggaggaaagtttatggtttgagaatcttttcttaataaaatagaaaagaattatatccatctgaagaacaatctggaagcacttagcggtactaaagatgtattcccctgcgagtcagaaatctcatccctcactgtatacttccgaaaatcagatccatatgggtgcgtccatggggacagatgtagtgctggtcttggcagtgcgaggtagaagccacttttagagtatagatagaatgtggggcattctccaacatggtgcagcaagtagccacacccagtcagatggactaactacaatataaatggatgtgtgtatgtgcatatgcatgtgtgagtatatatacggatatatattcatttctagatttattttcagtgctgcgatgaaaacgaacagaggagaatgggtttattttggctcacaatttcagattattgtctatggtgagaaacttacaaccccttgagtgtgaagcatctcgtcacaacataacatcacatcaacagtcaagagcagagaaaagtaaatgcacgcgtgctgtgtgctcacctagcgtcctctacttttatacagtcgtccaggactcacactgatttcaggatggttcttcccgtataaactaaggcaatcaagacaatctttcgcagacatggccataccaacctgattcagacagtccctcactgggactctccaagtgaggtgtgtgtgtgtgtgtgtgtgtgcatatacacttgtgtgagggagggctagaggagagagaaagagagagagggagagagagagaataaaatatatagcaagtattgtttatgtaggttaataatacgcaagcacaacatgttcttcaatgatgcaaacacatacagctcccgggggtggctgccagcggggagagtgggaaagcagataggaagtgaaagctgggtgtgaagagggtaacaaaatggaagcaaagtgaaggagcacatgctggtaccctgctgggcctgggaggtagagatgaccctcagtcctcgaggtgcaaagtgggagtgagaagtaagaaaagaagaaggaaggaaagatggaagagagacgcttgttcagaaatcctcccaagtgcacacagaggtgatctccaggaagtgagatggagctgggtgtactttttcatgtcttttaacatctacatataaagaacacacacacacacacacacacacacacacacacacacacacacacgagtacatggtgccgcctgtgactacttagagattcaaaatttttttctaaatttctttctctctgtctctgtctgtctctgtctgtgtctgtctgtctgtctttctgtctgtctttctgtctgtctgtctgtctctctctctctctctctctctctctctctctgtgtgtgtgtgtgtgtgtgtgtgtgtgtgtgtgtgtgtgtgcgcgcagtacccgcagtaccca

SEQ ID NO: 158 - DNA, 898 bp, Mus musculus
aagatgccttctgagaaggaccgagccaagaagaacctcgtgcagaggctggccctgaagagctgtctggctaaggagacactctctgagttcctgggcacctttataatgattgtccttggatgtggctctattgctcaagcagtcctcagtcgagaaaaggctggtgggatcatcactatcaatattggatttgcaacggcagttgtgatggctctttatgcgacttttggtgtctctgggggccacatcaacccagcggtgtcttttgcaatgtgcacctttggaaggatggagtggttcaagttccccttttatgtgggagctcagcttttgggagcctttgtcggggctgcaactgtctttggcatttactatgacggactcatggcctttgctgatggaaagctgctcatcacgggagaaaatggaacggcgttcattttcgcgacatacccaaaaccatttgtatccgtgccaggtgcctttgtagaccaagtggtgtctaccatgttcctccttctgattgtctttgccatctttgactccagaaacctgggggtccccagaggcctggagcccattgtcattggcctcctaatcattgtcatttcctgttctctcggactcaactctggttgtgccatgaaccctgctcgagacctcagccccaggctcttcactgctctggcaggatggggatttgaggtcttcacatttggaaataacttctggtggatacctgtcgtgggccctatgattggagctgtcctgggaggtctcatctatgttctttttatccaaatgcatcactcgaaccccgacccagaagtgaaggcagaaccagccgagaacaatctagaaaaacacgaactcagtgtcatcatgtagtggcatg

SEQ ID NO: 159 - protein, 292 aa, Mus musculus
KMPSEKDRAKKNLVQRLALKSCLAKETLSEFLGTFIMIVLGCGSIAQAVLSREKAGGIITINIGFATAVVMALYATFGVSGGHINPAVSFAMCTFGRMEWFKFPFYVGAQLLGAFVGAATVFGIYYDGLMAFADGKLLITGENGTAFIFATYPKPFVSVPGAFVDQVVSTMFLLLIVFAIFDSRNLGVPRGLEPIVIGLLIIVISCSLQSGCAMNPARDLSPRLFTAGWGFEVFTFGNNFWWIPVVGPMIGAVLGGLIYVLFIQMHHSNPDPEVKAEPAENNLEKHELSVIM

SEQ ID NO: 160 - DNA, 68196 bp, Homo sapiens
  misc_feature (1)...(68196): n = A,T,C or G
ctctccaccccaaatcaacagaatatacagttttttcagcaccacaccacacctattccaaaattgaccacatagttggaagtaaagctctcctcagcaaatgtaaaagaacagaaattataacaaactatctctcagaccacagtgcaatcaaactagaactcaggattaagaatctcactcaaagccgctcaactacatggaaactgaacaacctgctcctgaatgactactgggtacataacgaaatgaaggcagaaataaagatgttctttgaaactaacgagaacaaagacacaacataccagaatctctgggatgcattcaaagcagtgtgtagcgggaaatttatagcactaaatgcccacaagagaaagcaggaaagatccaaaattgacaccctaacatcacaattaaaagaactagaaaagcaagagcaaacacattcaaaagctagcagaaggcaagaaataactaaaatcagagcagaactgaaggaaatagagacacaaaaaacccttcaaaaaatcaatgaatccaggagctggttttttgaaaggatcaacaaaattgatagaccactagcaagactaataaagaaaaaaagagaggagaatcaaacagacacaataaaaaatgataaaggggatatcaccaccgatcccacagaaatacaaactaccatcagagaatactacaaacacctctatgcaaataaaccagaaaatctagaagaaatggatacattcctcgacacatacactctcccaagactaaaccaggaagaagttgaatctctgaatagaccaataacaggagctgaaattgtggcaataatcaatagtttaccaaccaaaaagagtccaggaccagatggattcacagccgaattctaccagaggtacaaggaggaactggtaccattccttctgaaactattccaatcaatagaaaaagagggaatcctccctaactcattttatgaggccagcatcattctgataccaaagccgggcagagacacaaccaaaaaagagaattttagaccaatatccttgatgaacgttgatgcaaaaatcctcaataaaatactggcaaaccgaatccagcagcacatcaaaaagcttatccaccatgatcaagtgggcttcatccctgggatgcaaggctggttcaatatacgcaaatcaataaatgtaatccagcatataaacagagccaaagacaaaaaccacatgattatctcaatagatgcagaaaaagcctttgacaaaattcaacaacccttcatgctaaaaactctcaataaattaggtattgatgggacgtatttcaaaataataagagctatctatgacaaacccacagccaatatcatactgaatgggcaaaaactggaagtattccctttgaaaactggcacaagacagggatgccttctctcaccgctcctattcaacgtagtgttggaagttctggccagggcaatcaggcaggagaaggaaataaagggtattcaattaggaaaagaggaagtcaaattgtccctgtttgcagacgacatgattatttatctagaaaaccccatcgtctcagcccaaaatctccttgagctgataagcaacttcagcaaagtctcaggatacaaaatcaatgtacaaaaatcacaagcattcttatacaccaacaacagacaaacagagagccaaatcatgagtgaactcccattcacaattgcttcaaagagaataaaatacctaggaatccaacttacaagggatgtgaaggacctcttcaaggagaactacaaaccactgctcaaggaaataaaagaggatacaaacaaatggaagaacattccatgctcatgggtaggaagaatcaatatcgtgaaaatggccatactgcccaaggtaatttacagattcaatgccatccccatcaagataccaatgactttcttcacagaattggaaaaaactactttaaagttcatatggaaccaaaaaagagcccgcatcgccaagtcaatcctaagccaaaagaacaaagctggaggcatcacactacctgacttcaaactatactacaaggctacaggaaccaaaacagcatggtactggtaccaaaacagagatatagatcaatggaacagaacagagccctcagaaataatgccgcatacctacaactatctgatctttgacaaacctgagaaaaacaagcaatggggaaaggattccctatttaataaatggtgctgggaaaactggctagccatatgtagaaagctgaaactggatcccttccttacaacttatacaaaaatcaattcaagatggattaaagatttaaacgttagacctaaaaccataaaaaccctagaagaaaacctaggcattaccattcaggacataggcgtgggcaaggacttcatgtccaaaacaccaaaagcaatggcaacagaagccaaaattgacaaatgggatctaattaaactaaagagcttctgcacagcaaaagaaactaccatcagagtgaacaggcaacctacaacatggaagaaaattttcgcaacctactcttctgacaaagggctaatatccagaatctacaatgaactcaaacaaatttacaagaaaaaaacaaacaaccccatcaaaaagtgggcaaaggacatgaacagacacttctcaaaagaagacatttatgcagccaaaaaatacatgaaaaaatgctcatcatcactggccatcagagaaatgcaaatcaaaaccactatgagataccatctcacaccagttagaatggcaatcattaaaaagtcaggaaacaacaggtgctggagaggatgtggagaaataggaacacttttacactgttggtgggactgtaaactagttcaaccattgtggaagtcagtgtggcgattcctcagggatctagaactagaaataccatttgacccagccaccccattactgggtatatacccaaatgactataaatcatgctgctataaagacacatgcacacgtatgtttattgcggcattattcacaatagcaaagacttggaaccaacccaaatgtccaacaatgatagactggattaagaaaatgtggcacatatacaccatggaatactatgcagccataaaaaatgatgagttcatgtcctttgtagggacatggatgaaattggaaatcatcattctcagtaaactatcgcaagaacaaaaaaccaaacaccgcatattctcacttataggtgggaattgaacaatgagatcacatggtcacagggaggggaatatcacactctggggactgtggtggggtggggggagggggaggggtagcattgggagatatacctaatgctagatgacgagttagtgggtgcagcgcaccagcatggcacatgtatacatatgtaactaacctgcacaatgtgcacatgtaccctaaaacttaaagtataattaaaaaaaaaaaaaaaaagaaacttactaaatgacacacagaggtattgcctttaaataaataaatcacatttgtcctgaacctgtcatggtttcaagggtgggaaatttattctggtaggcttagactaatcagtgtttacccttacatctgagagtggtcagtcttccaccagaagcccacagttgcataaaaagaaaggcagatttttttttttgagatggagtctagctctgtcgcccaggctggagtgtgcagtggtgtgatctccgctcactgcaagctccacctcctgggttcacaccattctcctgtcccagcctcccgagtagctgggactacagatgcctgccaccatgcccggctaattttttatatttttagtagagacggggtttcaccctattagtcaggatggtcttgatctcctgacctcgtgatctgcccacctcggcttcccaaagtgctgggattacagatgcgagccactgcgcctggccagaaagtcagatatttaaacgaaaacttggtctattagaaagaagttttaatagatgccaagtagaaaactaacaatgttcaccacaatatcaactagaaacccattttaaactataaagaaagttcattatagtgggcagatagaagatatacacacagaaatagagttttgctcgtgatgatcagttagaaaatagaataaaaaaagagatctcaacctaacttcaaaaataaatacaaataaatatcaaatgcccagaaataagcttaataagaatttggaagacacaacagagaaaataatgtatcttaacttaaaggacataaagaagatttgactaaatggacagatggactgtatttctggttatgaaaactcaatattataactttatccatatagcagggatgagatagaacttaaaaaaatgattcttaacttcatctagctaatatatgtttgaaaataatgaggggagatctaccagaaagtcattaaaatatatagcaaggcaaggtattaaaataacaattttacttctgggaagtttttatatataagagatcaaaatattgcaaaaatattagagccccactttatacatcaaaatatattctagaaaaattaacgatttaaatataaaaatgaaactgtaaaaatactagaataaaatataggacgaatttgaatattcttgtcattttgggatagtgctggtctttcttagcacacataacaaagttagaaaccatacagaaaaaggtttcagaactgagtacataaaattttctaaatctctatattgcaattaaatagcatcatcataagttaaaggataaataactaactggaaaatgacatgccacatctgaaaaataaaagacttatattcatatcttataaagagctaaaacaacataataaaaactaagcattacatatgaaaagtaggcagaggacataaaaataaaacataaaaaatagctaatgcattaaagatgctcaacttcactgttagccaaaggaatacatactaaaacaatattttttaactgttagattgggaaaaacatttaatagatttcaattacccgatattaaagaaaatgagaaaacagatattttaacacactttaaatatgcatactctaattattcaactctaggaagttatgctaagagatatagattctcaaggttgttcattgcagagttgttttaatgaacaataattggaaacaaccaattgcctatcaaaaggagtttgtttaatttatggcacatttgtacaagggaatattacacagtcattagaaagatgaagtttacattggcatagaaggctaaacagcaaattttaagtgggaaaaatatctagtaaatgtagtataaccctatttttcgagtgaagaaaagaatagatacttatatattattagatctactgaaacaaactcttcttcttttttcttttttttttttctttttgagacagtctcgctgtgacacccaggctggagtgcaatggtgcgatcgcgatctcggctcactgcaacctccgcctcctgggttcaagtgattctcctgcctcagcctcctgagtatctgggattacaggcatgcgccatcatgcccggctaatctttgtattttctgtagagacagggttccaccatgttggccatgctggtctcgaatgcctgaccttgggtgatccacccgccttggtctcccaaagtgctgggattacaggcgtaagtcaccatgcccagcctactgaaacaaattctgccgatattccaaccttttaataatggttatctctgacgacagggattataagaaattttaacattttaatttaaatacttctaatttttttcagtgtaatatgattttacactcatgggaaaaaggttatttcttcctcaggtggaaaagaaaaaagtgaaggagatattaacagacaaaatggtaatttggagtgaaacaactttgaggaatgtttttcagtattagagagacctgtgtttgttttggtcctggggtggtgggagaaagccagtgttggaaagagactgagagtgaagggaatgttgattggcctgggttccagaggggctggaatagaacattaacatgggccaaacggtaggaataaggaaaggaaaagaggataacatatataaaactaaggcaatttttttaggagtaagggcataaaaggacttacagtcaatgaaacctatgctttcccagtggatttggagaaaaaagtaatcatctgagtgggagggttgggactgtgagctggaggcatagaagagtatgtggttgctgctgggcaaagaatcggctctgaattatcaagtatgcttgtgagattcctgggctccatcccagatctacagaatcagtctctgagggaagctgattttagtgcatgctaaaatctggaaacttggaaataaaaggttaactaagaacatggggccactgctgatgctatatcacaattatctgcaatagcgttaatcaatacatttatgattttcttcagcaacatttagcagccagggaagagaaagtctgagaaaaaaaaaatggatggttaggcatacccagagttgggctttggcaacatgggtgtagaagaaaatcactgggtcaatggaacctgagatgctgggaagcgcttcattaacgtgggtaatcatgaggtaataattaggtggaaaggaaggctttgagggactggaatttagaattaggaggtgtaggggaagtgaggtcagggtgtgagaggcggttatacttataaacaccaggcttctatcttgggattgcgtgagtgtaggcaaagatggttacccaaggcaaaagtagataaacacagaatagaatgttggggagaagagaagataggaaggggcagagccaagggaactattaataaaagaacagcatatgccagccctggagaatcagtatggcagtgcatccaggaaagctcatcagctttagaaccattgacagcagtcaccatactcattctttcctctgcatgttggcaaatgcagagttagctctcagatgttcctatggtgacagcagaaattttggttcagtatcttgcttacaactctattctactctatggtgtattcattcagacatcttagtcacttagactattaattccttaataatagagatctggttttgttttttcatttttaaattcccactgcttaatgctgtgcctgacacatggtacatattcaatgaaaactttttctgagtgaatgaaatttaaaagcttcctcatgcttccagttagaactttggagtcagggtattttgacaaaggctccctcccagatggaataaaggaggaatactattcattgcttaccttcttaagatgcttttgaacattttgttaggtggctggaacattttgttcagtgaatattttgtatgagtaagctatgtttgatgatgagctgttcgtggtgatggaggtgagaagtgtgactgtcaattgaaggtagtaaaacagaaataataaagattccatcctcctctacctaagcatgaaatgttccatatcaaactctcagttctcttcaaactctctccctagggagcctctttactccaggctccagttatcaccactatgagcacacagacattccttcctcatctggacccatatcacttcctaacttacatcgctcagaagcctctgaggctcagttttgcacaagcagaattaatgatcttccactgcacttctggtcctcttccaggatttcctctcccagggctcagcagcaccttccccagcaagttaggaactcaggaaccaacttttctcagtctcttttcctcatctcccacatctaatccatgaaattcttccaattttaagatataaagaactcttggatccctccatttctccactgtcaaactaccacccaattctggaattctgtaatacccccaaatgtatctgcctatgaccattccaagccccctccaatcccctctccacctcacagctcggaggatcttttcaaaactctaatctgatcatgtcgtatttctgcttaaaccaccttaatgacttacacttttagccctaactaccacttacaaggcctagtaaggtctgacccttgcccacacctcagggctcattttgcatgctgtactccttcactctctctggggccaaccacagtaaatttctctcattctttgagaggcatcatgctgtcccctaccccttacccccaaagccaccaaggactttgtacatgcactttcttccccacttcatgtagttaatcccatgcttctttctgatctcagtccacacatgacttccttggagaagccatcagagatctctccaacaaagtcaaatccttttgctatatttgcttatggaaatatggcccccatctttgcagcatacatctcagttgtgattttgtatttatgtgtgtgggattatttcacttacatctgtctgcttcactagactctaggctctgtgaaggacaagaaccctatgtgctcttgttaagtgcagtgcttggcacataatgagtgtgcagtaaatagttgttagatgagtgaatgggaagaccagagaacgctcttgcatgttattagctgtagtcacagtaagaaagtcctgtttctctggtccatccactgggacttggtaatggtgtggtcataggtaactcttctagacaatggtatttatgataacttcatcaggaattaaagccaaagtgctgaggttttgtcctggttctgcagtagtgtggcctcaggcaggttataactttttaaagtctaaattctaaatgtcacctacagatgagaagtctccttctgcctttggcctctcaccagctgctttctccatgtcctctcctccctccctttttgcaaagctaggggagggcctgatgcagagctggcttccctgtgggaggactggaaggaaccacacagcatggatactaattccatgagtccacattggtaatcagaaactaggcctgccttgctatttagaaactaatgctatattctatttcttcagataagccagttttgaaaaacaaggcttgaatatttggcaggacaaggagctactcccaaacacagtttcttgccagcaaggatgtcaatttatcaaattgaaagggtataacctaggagcctcggttaggtgtactggctccctttctcgtttgattagaatgacatacacgctaattgatctctttccggctcagtcatctccatgcagtaaagaatttcaagctgctattgtttatttcctatgtattatgtctaaatatttcatggtgaatgaagaagagtgactattttcaaactggaatgcttcttcagaagaaacccaaactggaatgtttcttcagaagaaacttcagaagtcaccaaaaaggtgactcctccatctttctgattcttggatcctaaagtatcttcagcaagtgaagcccagtttcataaccgaagaggtgactccatctgtcctacagacttgcagtgtgaagcttgcaatggtttctctgtatgttaatttctccatctctaggatggcctatgtggttcttactaacctcagagtggtatcatgaagccactgaaatgataccagaagaaaacaagagtgattaatcttctaggatgataaatctatattttcttcaaattcttcattttgcataaaaacctttttcagaaaagaatgttaacattggatatatctacacctgatttgacagttccaaactacaccccaaccacccacttctgaatgagaagaaaaaaaaatcagaagcctgcaattgtgtaacatgaaaatcttttctggaccagggcccgtcactgtgatttggcaacacaactggcacatctcttttctcatctcttgaaaaaaaccaacagagaaaaaagtaccttgagaataaaggtaatgattaatctgtcaggcacaaaagggattgttttggggatttcgggttctaagtcgcagattcaaacaaatagcagcgaacagggaatgacagttccaccagaagacgattaagccacagcctctaattggaacggcatttgtacagtcagagactcttaccagacatctccaggaatctgtgagccattgtcaaaacgtccattttcatctggctgtgaaagtgaggaccacaacaggtaggtattggtagaaacaggagtcctcagagaagccccaagatgcagcctgagggagcagaaaagggaaaaagcttcaagcagagactggtcttgaagagcagcttagcgaaagaaaccctctctgagttcttgggcacgttcatcttgattgtaagtatttcctgatttcctacattcagacccaataatgcctccctagctgccaggctggtagtggagagttttgtttggtttgttttatttaagttaattgggatcagattcatcttttccaggaagaaacaagttactagaggctgtttgactatttaggggttgtgatattaagttttcaattacctattgcatttacccacaaaagttgatgggaatggaagagaaggagtgagtgaagtgccttctttatttcaggtatttacttatactctaaaatggctttgtgatttaaaagtcagtcgttagtgttttcattgatcaattgatttgtaccctgcttgcttcctccaagcattggggtgactcagccacctggaataagcatcaatagtcaataaatatagttggcaaaaatatacatatggatggcaagaaacatctcagtatgacaagtacttgacaagtattgtgctgtcagatcacttgatttttaagaaattaaaaattgcactaggtagaaatagtgtaccaggcaatagtccagctttagttttgtgtcatttttggtctctatttaaagcaaagtaatctctaaatatctttggagatttacaagacaattacaagaaccttctagatataaacgagggacgacttctaagaacctcttgaggattgcccagagatttactcagctattaacaagagactggaaagtttacttaagtggtctgggctttcattttgctgcacgttctagcattctctgtatcctgaagttttacctggaaccaggccatttgtgaatagaaatgtattatcatgtggcaactattgatttcaactggttttttttatcctgcttaaggatttcctactccaggtataaataatttcattttccttaaagttatagagaatagcccataaactctgtgcattaaaagttctttgcttggggcaaatacataataatttagaagaataagcttggaatgcatcagctaagccaagaatgagaaacaaatgtgaactcaaaaaattgaactagtggaatgtgaagagagagtcataagttttctggtctctgagaaacacattagaccagattcgttacagtattttcagggagttacggacaatttcttgcactcctcatcttcccttggcattcattcctggctgctctgaccacactcactgtcataatgtagcaagacattatgtagtaagacattatgtaagtagttatttctaactaaaataaaagaaataaaagagagaagatgaaagtcagtgattcttatgattcccggtcactgcttactggaaaatctttcttagtgagactgagacccctctgtcatgttacttgacaatctggccccaaagaagcagttgtcaatacagagtgattacagcctcacagtgacgagtgagtcagaaaagtgaagcaaattcagttacaattcttagtgctctgcagaaaacagaggaggaaatgaactacacatctttttttttttttttttgcaaccaaaaagtttaaaaccctctgtatttcttaagaagaacctgtttcataatcccgtgctttctgtgttgaaagtgaaatttgctttcagcagttcactgttcaactggccttgtgtcttccccactatgcaaggtaggggctaaataaagaacatcttgatattgtctgttgaaaaattaaaacttgtatgttctggataaagccagtcatttcctgaaatatttaatttccatttatactatacatttattttctaaagtgaaccctaataaaatctgcaaccttgattatcatcttcagttttgttggagcttgtggggatgtataaacaaaaagttcctgcacaaacacaatttttttaaaccaagaaatctacatggttttgctgaaagtttatccaaagtaattttctgctttattagagaatgtgcattttgccttgtattttctagtaaaaagctttgtacattgataaggcaaagggaaggggaacatcgaaaagatggcagaggatataaaggactcagtctttcaaatatgtgagattgttttttttccgccaaccttgggagtctggttctattttttttccctcctttcaaaaactgctcttatggggagcatctcaaactaatctaacaccatggtataaattacgggtccccaacacatgggccacggactggtacaggtggtccctggtgctaaaaggttgggaacagttggtataaaggactgataaggcctactggtagcattaagagaaaagaaggtccatgaaaaattctttataaactacaactaaaaccaacaacaattaagtcataagccaaaaagctagctctaatttggccttttagtcattgggatacgtaggcctttcacctttactagtgtggggggaaagtttgcaatgcaaaaggctgatctcttccttgggctgaacttcacagaatctctagtcatgtctagtcatttctcacagggactatgctcactcctactactctatatattctcctctctcttcaaacttttcaggattctttgatacagagctcatcttattgaagatgctgaagtgaacaacccagcaagcagctgtatttcctcctgaggtggaaggacagctttccagggctggacttttgagtagataacatactgtgtagtcggacagatgctgaattcttttctcaccctgtcaagcttccgcattagaggtctaacttttggcatctcttagaatggaaaaaaatgcaagtacttctgctaaaagtagtacccttgatctttaccttcagtgccctgaaggaaatagaaagaaactatcctggaacacagactatggaggaaataggggagtgggcagtacaggaaggaggaaggaaggacagggatggttgattgtatgtgagaaatttcagacactgcagtgttcccttcttcctgctcctaccttccaccaggactgggtgagaaatcatccctccttgctggggtcacagagtttgtctctccattttgagaggattctcaatcagacatgctggttatagacactctagggctttaaaattattattacaaagtttgttcagatcttgaagtaggtctattctatcttagggagcttttgagacaaaagaatctatggtcaggatttagagtgaaatcagaaagtttataagccaaattaaaggaaacgtccactttgcagggcagaatccaggacaattttggtctagtacattatttggaatgcccaggtactggcaggagagctctgagataagggtgggcagatatcactggccctttttattggtggagaagctgagctcaggctgatgtaatcatgcatcccgggaatcagcccagagcccagttgccctgccctgggcacacactcgcccttggacttccactgtgctcttcccttgagcagcacagagtgttcgcttgtccaaattctcgttcctgtttgaatgtttcctgaagagagagaaaggagagcgatcaactgcattttgccagatggagagacaagtgtaacacaattaagagacttatcagcccttgaatgaaagagctgggcttggtatcttgactccagtcattccctaataccatcatttgatgagaattaactcctttcatgtgaaagcccaagcgaacttgacaaagtttacagtttaaaatacattagcagtgtcaaaagatgattttacagaacagacgtgatcgtggtggggatattttacaggagatctgctagcagagtcttgggatctcttcaccacctacaaacacattcaaacctcaggtaacaccagggttctgaggtggctcagtgatgtcttcagctctgataaacacattgaccaagcattgcactgtgtttttcctctagtatttctgttttctagcttttcctcaagaccactcttttggttcagagcaaaggacctataggaaagtgggcctcaagagaccccataacttctctgtcttgctttctggctcaacagccacctattctttctctgtttcctccatgcttggttcttctagcttgctattttacaaaaccatccatctctccaagtctagggtgcccaggactgagggtcacatggagctagagctgtcagttggccaacagatgctagatcagaagcccctactgtcagcagtgccctggattctgcctgtgggtggtttgtctgtccaagtcgtgcaccatcctcaggccctcgctcagaaactttggaataagatggtctctgttgcctgactcttgcatcattcaattgagagaacagacacccacagtcttgcagcattttatcaaaagctctttccaccacagcagaacatcagaggatgtctaccgtcagttttacctgcctcttgttattatgatttatgttcaatgctcagtccttcaaggattggtacttctgtacttgggagttctgtccctttaagaacgtctgaggttctaaatctgaacatgcagaagtgctaaacactggggattctccttagatccttgccttgaagcaagagtttaaagactcgaggctgtcttctgtcaaatatgatgacgaggacaagagagggcaaaggaggttaacactaagcatactctataccccagacactttgatccttaaactaaatctaaactaaatctaatgaggtaaagatactgctctcattttatagatgaggaaattaggacttagtatgtttaagtcacttgaccacaagcaagtgtgtggtggagctgagattagaatcaaatctctccagtttctcttaaccacgctacagttaacattctaatatatgcttttgaagttttactacagttgcctataagaatatatattatagttttatatgtttaaaaatttacatatatagcttcatagcttatacatcttctccaatttgagactttttcccagagacactttctgaaatttattaatttgggaacatgtatgactggtttatgtacccatcgccctctcactattgattacaatcaccaagactgctacattgaacatcttggtacatgtctccttgtacacatgttcacgagtttctctggagtatatacctagaagaggacctggtggtcctagggtatgtgcatcctcaactttatgtgtattataaaattgctctccaaagtgatttcaaagttgtacttccagtagcgacatgagttcccatttatcacatactcaaccatccttgatatcatccaacttttatattttgctaatttgagagagagaaaaatggaatttcactagtaattgtactcaattccagtgcagtgattatcttttcatgtatttactaaacgtttaggtgcctcttttgtaaattgcctgattacagcctctgcacctttctctttgggatactttactttttcttaattgttataggatatttatatttattttaaatccatacattaaggtattttgtgttttcttattgaggtttaatattttgcttttcatatttgtgtctttaaataattagaatttatttggtgtatgatgtgggattggggtctattatctatgtctgcaaggatagacaattgtcccaaggccagttttgactgtctatcttttctccactgattgtgatgacattcctatcatacacctgttcacacgcatatgtggttctatgcctagactattcagtgccattgatctgtttgtccaaacttgcactacctcatataccattttttttgttgttgagaacattgtttgttgttgttgttgtctttctacttttattaccaaggttatattagactcatgaaatgaatcaaaattttccctttttttctattttctggagcactttgtaaaatgggagttatgtatttcttgaagattactcagcatgtgcacgaaaaaagagagggatggacagatgacaagaaaaatttctttaaaagttacaggtctggccaggcgcggtggctcatgcctgtaatcccagcactttgggaggccgaggtgggcggatcaagaggtcaggagttccagaccagcctggtcaatatggtgaaaccccatctttactaaaaatacaaaaattagctgggcatgatggcatgcacctgtagtcccagctactcaggaggctgaggcaggagaatcgcttcaacccggaaggtggaggttgcagtgagctgagattgcgccactgcactctggcctgggcgatgaagtgagactccatctcaaaaaaaaaaaaaaaaaaaagataaaagaaaaaaactctactatacctgaggtgacatcctcttttcaatttttaaaaagaagtttgttttccatttcagtaatttctgctttgatcttccttatgtcctcctattgagttgatcagctttctttattcttgccttttctcctctgtgtgccctttctattaacgtatttacccttaggctgggcacaatggctgatgcctgtaatccctgcactttgggaggccgaggcaggtggatcacctaaggtcaggagttcaagaccagcctggccaacatggtgaaacctggtctctactaaaaacacaaaaattagccaggcatggtggtgtgcacctgtaatcccagctactcaggaggctgaggcaggagaattgcttgaacctgggaggcggagattgtgccaaagcactccagcctgggcaacaaaatgagactttgtgtccaaaaaaaaaaaaaaattacccatatatatatatattttttaacttaaagtaaatcaatttttcttctgaacaacacaaaaactttaaaaaattctaactccaatcaaccactctatcttacatgtcattgttgtctaatatttaaatttttccctcattattattgttgttactggtgttttaaaataaatatttttgtttgcttatttaaaaatgcattcctatcatttactggtttatttgctaatcattactgcatacacccactactttctcttgggttctgtctccttattcttgcagttcttcctttagaaaatttttcaggaagggtgtgtgacagatgaactttctcagtctttgtctgaatgtgtctatttcatgctcaaggttgaatgataaattagctgatacattttaggttgataattatttttgcttggcatttttcaggtgtctctgtcatttttccaatgcctctgttattgctgttcacaagtctctgggtctcatttttgtccttaataatctgaatttatctggtaactaataagagtttcactttgtttttttattttgaaatttcactattatgtgcctagaggtgaatttatttctagttcttaactcatttttcatcttcaatttaaagggttataatatttaccaattctggaaaattttcctctttattaccttgcctttcccccagtctgttttctccttttagaactcctactatattggtatgcatgttgactctgtcatttttttatgcctcaaccatttttttcatatttcttctcttattctcttaatccatgctgaattttgtatagttgctgtttgaaatctatctttcagttcaccaattccctatttggttctatctaatcttctgtttaacacgttcattgagtctttagtttcactatcttttcatttctatatgttttatttggttctttttttcttttagtttcttttcttgtgtgcttatttctttcatttccttaactcaccaaagcctaatatatttataatattttaaacctgttctgtcgtctcgagttgcgggggagtgaatcattctgcctattttatctactgactcttattcataaaggatcttttcctttagtgttttatacatctgtattataaattcttcagggagatttatttttccctgtgggaattccacgtggcctaaggtgtggatttgttcttccagagcaggtttgcatttgcttctgctgggttccccaggtataccgccagccagaaatgattgctgtggagtggcaaactgaaaagagaagcctgggggatgcaggtgcctgttgaagagcactctcccaaaagaacggcactctgtgacctttctcccaactgtgaccgtaaatgactaagagacctcgtgcttcctacaaatgaggccagctcttttgacatccttagactttgagtcactagcagctgagggagaattttcctacagacttccccctatcagcaatgaacgtggaggaccaggctcacctgggaaatcttacagtttcaaggcgcttgggagaaaagtccgttctggatcactgatctaagggctgcagactcctggagccaaacttgattctgccaaacaggattctgcttctgattgtgaattttaattttacccagaaaactcactgttttcattgactttcaaaggggaagtattttttttttctactttccagaagtgggtttcgtcagtttttctttagtgacgaatcccattgcaacatgttctcattacttgacgagaaaggaaaacatactaatgagagcagaagttggcccttatttactcatcagccctgtgaaagtgacctaacaacccacagatggttcaaatggctgaagcagttcaaccgtgaagaaattaggtgcccattatacctccagcaggcatctaatttcatgtctggggcaggattgctgagttcactgaaacttctaagcaaagcaagtgatttaagagaaactatgccagcaaagtgtgccggccctgccccttgcccttttctccatctcagtagcttggctggtcatgctaagatgtgagcctagaacagtcagtcaagaccataaacgacttgaaggcttagtccctctcagcgcacatgccttagagtctttctggaaattcaagctttcttatgagagtacctcccgaaaaccctatgcttctatcaacaggtgattggttaaaaaaatgggggtgcatctatgcaagactcctatttacccattaaatagaaggtttacatgctaatacaaaaatactctaagctattcaagtagaaaaagcaggcagaaatggtatgtgttaaataccctcacctgtataaacacatgcacacacacacacacacatatacatgcacacacacagaggcacatgcacactttttgacaacataccaggaagtattgatattagttacctgtggagaataatatttaaaatctggggttggaaggaaacacatttcttatattttatagtatacccttttgaaatttaaaaacttgtacatattcatatgtattttcttcacccccttcctccccatgagagagctcacccagtagagtatgtcttttcaaagcatttttgtagggagttgctcaaaatctgttctgaaaaacactagttccaaaagatgcaaacaagaattaagtgaaaaaaatacatgtggtccttcccaaatatgtttgggaaacactgggttaaaccaaaataagcagttttctcaactgcaggaattatcagagcctttaatgttctctgtaaatctctaagaggggaacagaatgtaaagctgtcttcagctctacttaaccacaaaccccttttttgaggagcatctaatggaactaatgatctgtgaaacatactttgagatttgcagaccctggaaacacatcagtcctcagaactcctccatatgcagagatctcccaggttgagagtgacaagaggcggccttggcactgttgggccctgtgggtagagggagaactgtcctcagcaacccccactcacacacagcccactcagagtcacagttatcctgatgcaaacacaacttaattaataaatgcttcattcatttcttattctggtccttgggatggtgatcaagttcccatccaggtcagcatttgggatgagttgagggatgtgaatgcctggtgaggtcagaaaaggagagcattgttcttttcagcccagtagagatagtggagttcaatcacctctcctttctgagctctgagttggttcttggtgcttttttctacttggagagcactgaggctggccatgttcccattcacctggctctcaaattgcagattcctctctttttatgagcctgccctaatatcgcctcttttcaagtacagctggttcttgggtgattgacctcttcctgatattctgtcaggctgcatgccaccacatattttatttttagccagaagatccaggtttcagtcttggttctttgtgactgtttttgttatgactgagaaagttttattttgcaattggaaaactaactgacaggaaagctgtgcataaatctgtactctgtgctaataaaggaaacaggctgacccacagaggcagcagcagttgtcacaggaggaacactgggatgggaatgaaagaatctggctccagattcagaaactgtcacctattagcaataggtcttgtatcaagtcactcagactttcagtttttaactggggatgaagtattgggaggactcacagaagtaaagtgcgtgagagtgcctcaccatggcgcaaatgccatgtgaatgtttcctccttcacctattgctggtcaaaatcatgtgcagtcaaaccttggccccagcacgtaccacttatgggaatgtgagagcaattcttttaacttctctaagctttggtttcctagtttgtaaaatggagacagaaagagagccttagtcataggtcattgtgaggactgatgggctaatgcatggaaagtgctcaactcacaaaatttactcaatatagattagttgttattggtattattgttatcttcatatgttcaaaaggctatagtcacataagctgaataggagggaataaacaggtggagtaggatggatgggggacttctctaacacacacctatagcacaggctggagggccaaggtttgcagagagtgctgtgctgacagattgccatggattctccttcctctccagttacaaacttataggagcagggaagcctctggtaagccctaaatgactcccttctcaagaatggggattgtgttttttggaaacactatggccaccacgttagacaaagttttgcctataggcagtccttcctttgatggtagccacagatgctttctccaggagctaggactgcatcccagcccaggtgtgttatcaccatggtatctgcaaggccaggaaatcactggcaccaaaagcttaatggtttcctcttcccagaccttaagacaggagtcaacagctccaaaggtaagtgagaccgaacaggcaacacatatgagtgatgtgggcatggtggggttgcagggaaatggatagcgtatgccctgtctcagaggggcatttgccattcagacccactccactgtggccttaccccattcttgcatcaggagtttcaattacttgagctcaccacagcctgatggaaggtagtcgccatcgcaattaccttaggcatatacttcaccctcctacaagtttcagaatattccaaggccccttttactatctctgatggaatttatggctcaacattctttatagccacaggctttcatggacttcacatcattattcggtcaacatttctcactatctgcctcctctgccaactaaaatttcactttacatctaaccaccactttggctttgaagccgctgcctgatattgacacttcatagatatagtaagactattcttatatgtctctatctactgatgaggatcctactcttttagtataagcaataccattgacttccaatcaataagctttgataatatttgaaaaagagtaattagctttacactagccctagtgaccgacaccttactagcaattacattttgactcccataacttaatatttatatagaaaaatccagcccttatgaatgcggatttgactcattaacctctggccaccttcctttctctagaaaattcttcctagtggtcaccacatttctcctgttcaacttagaaattgctctactactgcccctgccatgagcccttcaaacaaacaacctgacactaataatcagcacagcccttatactaattatcattttaatcctaggcttgacttatgaatgaacccaaaaaggattagactgaattgaattggtagatagtttaagttaaaataaatgatttcgactcattagattatgatagactatatttaccaaatgccctttatttatatcaatattatattaacatacaccatagcattgctgggaatattagtctatcaatcccacttaacatcatccctattatgcctagaaggtatagtattatcaatactcattataattattcttataactttaaatatacatttcactctagcatccctaatcccattagcctcctattatttgtggcctgcgaagccacagtatgccttgccttactagtttcaatctccaacacatacagcctagattatgtacaaaatctaaatttacttcaatgctaaaagttattattccaacaattatactgttaccaccaacatgactctgtaataactccataatctgaattaacataactatccacaacctattcatcagcctcattactatatcttacccaattaaatgataattcatctaacttctcactaactttctcctctgacccactaacatcaccccttctaatcttaacaacctattacctcttgtaattctagcaagccaacatcacctttccaatgagtcacccccacagaaaaaactctgtaatagttctcttcccctacttatcacacttacccatactcaaaataccttgggttcactaaacataataataataataatatttaccacccaagaactattaacttcctgatctaataatcttatatgactagcatgtattatgactctcatagcaaaaatacctctatatggacttcacctatgactccccaaagcccacgtggaagcccctattgctggctcaatagtacttgcagaggtactcctaaagctaggtggctatggtattatacggcttacccttaccctcaaccccctaacagaatatatagcctaccccttcctcatatccttatgggaaatagttatgacaagctctatttgtctatgacaaacggacttaaaatcactattgcatattcctccataagccatatagcacttgttattatggctattctcatttgaaccccttgaagctttacaggtgcagtcacccttataattgcccatggagtcacttcatctttactattctgcatagcaaattcaaactacgagcgagtccatagccgaattatattacttatctgaggccttcaaacactgcttccactaatagcctcttgatgacttttagcaagtcttactaaccttgcctttccccctactattaatttaatagaactcttcatcactatggctttattctcttgatcaaacatcaccattatgcttataagacttaatatactaattacagatctttactccctacatatactaatcacaacacaatgagggacacttgtgtattacattaacagtattaaatgctcatttacacaagaaaatacattaatacttatataccttgcacctatctttctattatccttaaaccctaagattattatggggtttgcatactgtaaatatagtataaccaaaacattagattgtggatctaataacagaagtctgaaacttcttatctactgagaaagtatgcaagaactgctaactcatgctcttattataccactattataaaaacactagttcccttaatcttaccaattattactaccttagccaacccctgcaaaaaagattgatacccatactacgtaaaaatatctattgcatgtgtctttattactagcctcatccctgtaacaatatacatattcatagatcaagaaataattatctcaaactgacagtaacaattcaaactcttcaactcccactaagcttcaaactagactacttttccacaatatttatcccagtggcactatttgttacctgatctattgtagagttctcaatatgatatataaactcagaccctaatactaatcaatttttcaaatatttactcattttcctcacgataatattaattctagttaccaccaataatctcttccaactttttattggatgagaaggtgtgggaattgtgtcttttttactaattggctgatgatatggccgagcagatgctaatacagcagccctccaaatggtcctgtataaacgattggcgatattggctttattttagctatagcatgattcctcttattttccaacacatgagagcgtcaacaaatatttattctaaatcttacccccaattcctttccactaattactgttctcctggcagcagcaggaaagtcagctcaatttggccttcatccctgacttccttccactgtagaaggcccaaccccagtttcagccctactccactctagcactatagttgtacagtttttctacttatctgcttctaccctttaatagaaaataatctatgaatccaaacctttacattatgtgtaggggcatcaccacattattaacagcaatttgtgctctaacacaaaatgacatcaaaaaaaaaatcgtagcattctccacctcaagccaactaggccttataatagtcacaattggtattaatcacacctagcatttctttatatctgcacccatgcctttttaaaagctatatatgttcaggatccatcatccataatctcagtgatgaacaagacatctgaaaaataggaggactattcaagactctactcctcacttcctcctcccttatcattggcagcctcacacttacaggtatgcctttcctcacaggcttttattctaaagacctcattattgaaactgcaaacacatcatacaccaacgcctgagccctttctattactcttatcgcaacctccctaacagctgtctatagtacccaaattattttcttcgctctgataggacaacctcgcttcacaactgattattattaacagaaataaccctttcctaattaacccaattaagcacctaataatcggcagtatcttcgctggattcctcattaccaataatattgttcccacttcatccccctaaacaactatgccacttcgcctaaaactcacagccctaggtgtgaccaccttaggcctcttactagcaatagaactaaattttataactaataaccttaagctaaagtatcaattacagacttttaaattctccaatatactaggtttttactcagccaccatccactgtacagctcccccaactcaagtctatttacaagccaaaatctggcctcacttctactagacataatttgattaggaaagtccataccaaaaaccatttcacaaactcatataatcagcctccattaccatacctgccccaaaaggcctaatgaaactctatttcctctccttttttattttacctcttctaactctaatcttaattacctaatcatcaccctgagtaacttcaagtgcaacataaatactgacaaataacgttcaaccagcaactgccaccaatacccgtaactgtataaagaagctgcaccgacagaatcctcacgcaaccacctcgccccctcaccctcaaatattatgcaactccatatgctattaaaattaattataatgaccatcccatcatactcattcaccaaattaacaccaactctgttaataatcctaataataaagcccctcaaatgtcaatacttgaccctcatgtttcaggatactcctcaaacaaccattataccacccaaataaattaaagactattaaccccacgaaagtcccaccaaaattcaacagaataccacaacccacagcaccactaataattaaccctatcccctccccataaataggagacagtttcgaagaaaaacctgcaaaccctataactaaaagaatacttaataataaatcataagccattattcctacatggactataaccatgactaatggtatgaaaaaccatcattgtatttcaactataagaacactaatgaccaaaatatgcacaacgcacctgctaataaaaattattagtcattcattcattgatcttcccacaccatccaacatttctacatgatgaaactttggctcacttatttgtgcctgcttaattctccaaatcactaccagattatttctggccatacactacacatcagatcccttaactgccttctcttcaatcaccaatatcagccgagatgtaaactacggctgaataattcgttatcttcgtgctaacggcgcttcagtatttttcacctgcctcttcctacacattggccaaagcttatactatggttcatttatatttctagaaacctgaaatattggtattatcctgctactcacgaccatagcaatagcatttataggttacgtactcccatgaggccaaatcttctgagtttttacacacctattctacaaacctgctatcagccattccgtatattggaactgaccttgtgcaatgaatctgaggtggattttcagtagacaaagccacccttacacgattttttgccttccattttatcttacctttcatcattgcagctttagagacttttcaccttttgttcttacatgaaacaggatctaataacccttcagggatctcatcagaccctgacaaaatcactttccacgcttactacacaatcaaagatattctaggcctaattctcctcctcctcttcctaataattctagtactattttcacctgatctcctgagctacccagataattacactttagccaaccccctcaatacctcgccccacattaaaccagagtaatactttttatttgcatatgcaatcttatgatccatccctaataaactaggaggtgtactggcccttatatcttccattcttattctagcagttatttctatacctcacatgtctaaacagcaaagcatagtattccgtccactagtctcacactcatatgaatcggagggcagccaatcagctacccttttattatcatcagacaaacagcatccattatgcacttctcaactatcttcaccttacaccaattaccgccctaattgaaaacaaattactcaaatgaaactgcccttgtagtataactcaatgctccggtcttgtaaaccagaaatggggaattccctctccaggacaactcagggaaaaagcacttctgcttcactgtcaacacccaagctgaaattctaattaaactactccttgtacgtttttcagcacacactttaactgctatgtcagtattaacgaactaatactaatacattagtgcttttatatacttcatgcattactgttaatcccatgaataatatattgcactataattgtttaatcatatatagtacattaatacattaaagtacatcaagaatataatctgcatacatataaccacgtattaacaatcccccaatcaactataacacattcaccgtatcaactgtacaactcaaactaagccaacacgaatatcaacccatactaaaaatccttaacattacatagtacattaaatcattcatcgaacatagcgcatttcagtcaagaaactccttgtcaacatggacataacctcgcagcccagtaaccacagactgggcaggaaaactgcaatcccctgtaaatagcatgcagtttatatagcattttcacttaacaccctcctcttaatgactttcacctggcaaccttcatttaactcaaaactcagggcctcattcccctgtacagcccatgttgcatggaactggccagggttcatatgtttatcatagacagggaacaaatctctaggttggccacttccagattccctagctcataaattcaggtgcgtctgccatacaggatctggctaagggtaggcttaagttattgctatcaggtgcgcttaccctacatatgtcctcaggaaaattacttaatttctttgtccaaaggtttccttagatggaaacaggagcactttcctcctgctaaaggggattaaatcgagaatatacatatcacatatatacgtgtgtacaaacacacatatatatgtgcatatatacacacgaagatctgtacgattttaaaaatgtgttagccacagatgctctgttaatgcttacttctgtttttataaatatgtgcatcatttaatgacaaaatatctacttgaggatatttttgaataaataattaaaatgtggttcctttcctatatcccagaatgacctgcagcaagggtacaaggaaaagcagtcacaccaaacttaatggttctttggcgtaatgtgttttgcttgccacatattaccggaacaaagtgggcctttgaaacgggcccccctgggtatttgttttcccaaaaaaaaagctctttaaaaaaaaaaataaataagaataaattaacacatttgggggggggagaaaattttgtagagggtttttgggggggcatttttttaaaaaaggcggcaccctggcgttatttttttggggtgggggggnnnnnnnnnnnnnnnnnnnnttcctcctcctaaggggattaaatgagtaatatacatatcacatatatacgtgtgtacaaacacacatatatatgtgcatatatacacacaaatctgttgatttaaaatgtgttgccacagatgctcttttaatgcttacttctgtttttataaatatttgcatcatttaatgacaaaatatctacttgaggatatttttgattaataatttaaatgtgttcctttcctatatccaagaagacctgcagcagggtacaaggtaaagcagtcacacagaactcatgttcttgggtcatgttgctgctgtccacatagtacggagcaaatgtgctctgaactggcaccactggatttgcttcccagaaaagtctttgaaagaacaataatgaatacataccatctgggtgagacttggaggtattggggcattttagaatgtccacctggcttacttttttgactttagctaaataaaatgtaataaagggggcaggtgggagttgggggaactgttcaactccctggttagtgcccccaaatgctgaccagtgccacagaaacccatgtggctgttgggtgtggctcatccgtgtggaaaaggccccttctaggcccatactcacttccagtgttaggcatgtttaatcagcgttagcggggagtgtgcattgataaccacaaaattggaagacactatgaggagaggagtgtgtgagagagaacaagagaggaaagggtttaactctacctttcactctagttttctaccggtgggtgcttgatcatctaacggaagttgtctgtgcaaggggagctagaaatcaagtgagcagaaaatcgattttgcataaattgaaaaagctggagataatcaccaaaatatctcagtcatctctgagaaaggaagggaaattggagctgaaaaggattttcatttctaggtccctgagaagctttgatgacaaggcacaagtgttgtatattttctgaactagggtgaccatacttattgttaccagaaaagcacttgtcctggtaaagaccaggaactataaggagacaaatagcttcatcctcagccctttctctttggactgacacatctggtttacaaatgaggccatttatactggatagattgggaacagatggctgctacctggggtcttcaagtcctcaccttcccagacagccctttgcttttcaacatgcagatagaaaaaccgatgcccctattccacatcctatggaaaacctagtatcctccctgaagatttccatggattcttgggggcattggttgcatctgatgacctcttgttccatccagtgtgtgacggctaaaagttcgggcctctgactaaaacagacctgtgatcaaatcctggttctctctccttacagtgatgtaaaattaggcaatttgctttgatctttctcagcctcaatttgctcatccatgagatggagataatactacttacctcccagaatgttataactgttaagttaataatgggatagtgataagggaatacaagtaaagcacttagcatgcaacctggcacaaagaatgaactaaatagagggtagctggtattcctttattcacactaccctaaacagatgagtcaagatggtaaattttttgtacagtatttattccaaagcgcatgacaatctttcccaaggagatccttttaactttaaaaattttcaagaactctatacactacaacattcttttagtattcattaattctgaaaatacaagatcacaaaaggtagatagaagacatgttattttttccatttttggacaatgtttgatgcacacaaggaatcacagacctcttgcggtaattctaaggttccctggtggtccctggccccaggttgcctgcattcacaaacacttcactacggaattcctaaacttcattaactactgcttttctgaaagggctcagttcttacatactcaccgaacaaatatttattgagtgtctgttatgcaccacatattctgctaggactatcttgttttacactttaaaggacataataaatataaaagagatttgagcagggttacgtgcaataaaacctgtgggctgattattccctctctccgttcccggcatttcagcttgtgataatcacttcaccatgtcgggttttacattgtgtccaataaacagcttgtcacaggggtcatggctcagttgagaactgcccagcagtcccacttggtatttcttagaaattatacctcccacttttcacatttcatatcctacccccaaattaagttgggttttttttttagtaagattcccgtctatttatcatttccacattgtttaaaggaggattattcagggtagttttgcttcctgcgcttctttttttattcatacataacagatgtacatattttgggggtacatgggacattttaacacattcatataatgtataaaaatcaaatcagtgtgattgggtgatccattgccttaaatatttgtcttttcattctgctaggaatattcaaattattttcttctggtgactttgaaatatacaatacattattgttaactatagtcatgttactgatctttcaagcactaggtcttatttcttctatcaaactgtatatttttacctattaatcaacctttcttctttcctccgccctttcttgacctctagtaactacccatctactctctgccttcatgagatccacttttttagctctcacataaaagtgagaacatttgatgtctgtctttctatgcctggcttatttcacttaacataatgacctccagttccattcacattgctacaaatgacaggatttcattcttctttatggttgaataatgtttcattgcgtatatatgccacattttctttatccattaatctggtttgtgggcatttaggttgattccatattttggctattgtgaatagtgctgcagtaaacatgagagtgcagacagctcttcaacatattgattttatttcttttggatacatgcccagtattgaaactgctgaatcgtatggcagtcctgtttttagttttcttaggaacctccacactattttccatagtggctatattagtttacattcctaacaacagcgtataaatgttcctctttctccacatccattattccctttttgataaaagctgttttaactggggtgagacgctatctcattgtggttttgattcgcatttctctgatagttaatgatgcttgagcatttttttttttcatatgcctgttggccactttctgtcttctgagaaatgactactcagatcttttgcccgctttaaaatcagattatttggattttgtttgtttgtttgctattgagttgtttgagctccttatatattatggttatcaatcccttatcagatggataggccaaactaaattttttatcttttcctgctttttcttgaaggcagagaaatggggtttcttttgtgcccttgcttaagtttagatattttaatatctttcatcaaatattattatttaagcatggaatataaagaattagggtaatcactctgtggttctccccatgtatacatgttaaataaatttgtatggttttcctccaattaacctgaaaaaaaaaaagtacttccctggtggacattatagtttttgggggtggggggtcggtgccacaagacaaggtggcaggtatataataaaatggcaatgtgcagacgtgatagagtaggcacagaaagccaatgagggcttttgttgtcagagaaagtcctatagagaaagcaggatttcagctcatcattaagaatagattgggtttagttggggaaggtgcaaggaaagggtgtttcttctgaaaggtgcagcatagcagatgtgcagggatgaaaataagtgtcatcagctcaaagggctccaagtgactaggatgtcagcatggctgatgcagaagatctgtgctaaagaatactggaaaggaaggtggctgggaatcatgaggtaaggcaatggagagccctgaggaccagcttgaggactctgggctgacatttcctgagcaatggggaggtggtgtgtggtgcttcatctggcatggtctctggatggggagagactggaggtggggacactgattggaggctgcagatgaaggctctgcaagatatgggaatgacagactatgggtggccaagggagagaaggggaaggaataacaggtattaataattccagaatgtttgctctgggtaatcgggaatgactggaggagttcccaccaattaaagttttgtaggaattctgcctttcaaatgtctttcttccttttccaatgaaagtcttttccttcttccatgtatggaacctgatagtaaaaaaagcatttatctttctattttctagcattgctttcctacaaaaagcactaaaatcctgccaattatgaaatggcccatcttcagagagtaatcataaatagtcaaaacaacttgaagatcttatcagcttcccgctttccctctctcaccaaaattaaaccccatgactagcaatgaaacagcaagtatttcaactagatgtatttgttatagatgtcttttctcctctgtttttattgccaggcagcaagttagcagttaagtccatgggtctgttttcttaacctattcaccctgaactggaatttttgagtttatactaaaaacaataatatcctacccttattatttctctttgttgtttaaatattgccttcattaatgttatctcatttgattctttatcaaaaagccatatgattcaaatctggcacatatcattattcccctttaatatatgagcaagctgagaatgagaaataatatgttcatttacattgccaacaagtgtcatccctggaaataatgtctaggatctgttattcaattacacccaatatactagaagctgttacagagaaaaaaaaagttcaacatattatcttgaaaatcttcttataaaattgagaaaatcaggcataaatatgtaaacagttaaataacattccatggctaagtgtcccaccagatggcaatagaagccatgagtcagaaggtacagggttaattaccgtgtcataatgtgatacacaaatatgggaagactgtgttcatttctgggctctgtgttttaagagggacactgacaacgtagagcttacccaggtgagactcactgggagtccgaggagacgcagagatcaaagatgaagggacaagtgtccaaacgaagagagaaccccgggagggcattatgcccctccacttattgcaatgcctggtatgtgaaaggcttattctccttggtcccaacagtatgcctgtggctaatgaacagaaattacaggaaggaagcctccaacttcatgtaaggaaggatgctccaaccacaggaacaatgaaaagtatacagaacaagctgcctaatgtggtaatgagctccctatccttaaaggtgatccattatgggttaggtgaacacctatttaggatgttgtagggagaatgcctgtatcacatgccttctgcgtgctgtcaagttcagaaccagcaaaatggtataactgagagatggcatggtgcagggtttaagagcacagtctctagatcctatatgatgctcagtcttggaactcagcaaccatattgtaaagaagccaggccccacggagaagccatttgtaagccccagctaaggtatcagaggacagtcaacatcaaccgtgagatgcatgaatatgcaagctttcagataattccagtgttccacttttcgagccactccatttgataccaagtagagcagggatgacgtgccaccccaaaccctgcccaaattgctgattcataatcaaaataaatgctatcatttaaagccactaagtttgggggtggtgaattcttcagtgctggataactgaaatacaaagtttgtgtgatattcagagttaccattggtcttcacatccattaataggtggtgctgagtcaactagaaggtggtgttatgtgcagaaaggcagttgggtgggttgtgccgatgagagaagagaaggcttggtgaagctattgagagaacatgaataaaagattaatgaggaactttgaagacacagtgaaggacacagtgaaggctagatcttcattgtgtccatggttttgtcattccctccatctcctatatggttttgtgacttttctaattcttcttgaggaggcagctagattgagcaagtgctaggtcctgtcaagaaggtagaagaaatcttaaaagtctgtaggcctgcagaggaggagtgcgtggtggacttcagaagcagaacacccaaggggacagaataaaatcaaagagactcacatattacagaccatgatacattagaacatccacaatgttaatatggaaaggaacccaagagattgttttctagataatgaaatcaagattatgcacttggaaggtaaataagtacttattgtagagtacaaacgctacaattgaacttcaggggagaaatattaggtttgttgagaagaatctgaatggacgacagacctaaaaatgctttctagatagggagaccaggaaaatcaagatagggtggatatgataacgggctgtttttgagtctaagaagggaaaggtacggcagttcttgaaggtgagatcagggaatcacgatggaactttgtatcatcaataccataaaaaacagttctctcatttttggaggaaaaaaaatacactgaacacacagaaggagagaaccagagtgggtggccagatctccagcaagcagcccatgatatattagaatgccaatggtctgctgtcccggtgctctgaatacaggcaagaggaggcaggcaagggaacaaaccaggaggcagttacctggcttcctcgttgcttttcaggctacaataaaacatttctaaattaagatgtaatgctggaaatctgggctccaatcttctgagtggcgattctgatgagggtaactgaagtccccacattgctcatcactcctcctatttcctgcagcacacagcattgattatcctcctaagaaaagccatttcagcatctagagtggaagaggggagtattaatcatagtgaaatttgacaaggcagaagcctccacggacccacttgagccatttaaagcttttatgtgccctctagactggaacaagtgcatgtacatcaggaccataaaagaggggagacgcttatttagaaagcattaatagctcaggactggcctctctcttttgcgtctcttcttagccctggttgtctaagtcaagtcatttcagctgtcagtattgttttattcctcattttaggagatactactaaaatgtcagttcacctggaagttgtgcccagagcatttaattggatttacattaaaatgaaagaaatatgccaatgtggttttaattccaacagttattataatagataaggattctagaaaaaataatgtcaagtctaggtgaaattgttaggctataaaatggactcaggggatttttttgaaaagagaaaggggacatgttcctgctgtaactgtatttaacattcagcgtagggtacaaagctctccaccttttctctgcttgctaagacaagtggatgtatcttagaactggggactagaagggacatgaaagcatcatctacgtaatttctctgctgtcagagaaatcattctatgtgtattaaatatctcttgtttgtaacttattctcctctaaaggacctcacaaatgagccctgagggagctgtttagaattaattcatcacaataaaaaaattgtctttgtgcaacctttcatattttagttttagactcttccattttcagctctatatgaaaagactcaatagtaggttattatcttcctgataaaaagccttcacattgttaatctctttttccaaaaatatatttgtttctgaaatatttcctcatatgctctcttttcctgcccctaaatagtatgtattgctcaatgccaagccctccctcaagttaattgctcttttttagttataaaaccccaactggagtccatctaatcatctaataattcctatacttatgcctccagggccacactagctttttaaactacagcatggtgaaagctggtggtcatttgctgtctcattttcctaccaaacttgtatgaaattgttctgtctttcccaagaaccgtccttcaccaagtatttcttcaatggactgtgattaaatggttttaactgattattcaatgaatatgtggggcccattttttaaaaaaaattagaaaacagatgggttttaaaaaagagaggatatacaatgaaaagttctcttccaatctctgtcccagtcatgtgctcccccaacccattagggtctaaccccatttctgctgcttgtgtattcatggagagagatcatgtacataaaaagaaatgcatgtaatgtatttaatacaattggcagcacgttttagcactgctctgcatctttttttattttaataatataccttgggggtctttccactttggtatacatggatctcctttattctatttttttgtttgtttgtttctatttttttcagtagactagcagtctactgactggatgtaccatcatatatttattgcaaacctttctcaatatggatttcattctccaaaatatcctctaccagctgaagattgtggaagactcactatcatacttcactgtgcaactgtttgcagaatgcttactatcagcacagcactgggcttggtgccagagggaatacaagaagcagtgagtttggcagcctctgctccctaggaaactacagccccatcagggagaaaatacatgagaataagggggtcctgattgccaaatctatccccctaaggttttcctttgttttcttgtacatcagacattttttctaatgcatggtacaaatggcctttcccctttattggatgtgtgtatggtggtttgtgtgcctggtcctgcttttatactgggagccacaagaacagaactgtcaaactcaaatacctacagaggccaggagggtgacctaaatgagtgaagggtagagaagtgagccagttgggaaggcataagctctgtttaaagggatccccaactgctactgtgctcgattatttccctgtgaacaaccagatcttttggttgattaaaaggaaccagtgggtaacaggtacatgggacttttctgtattatttcttacaatacatgtgggtctataattatctcaaaataaaaaatttaattttaaagaaaatcagatacctagatcattgtgtgaaatgtcctgatttataaatgtaggcaaaatctgagcattgtgcaggtgcagcaaaactcatctatctgtaagccaaatgcagccttgggtccaccattttgctatctgtgtatagctgaatcattataatttgatttgtataaaacccaaggcaacccaatccatgactttgctttaaaaatacttgctactgtgagtttccattacttttgacagtagccatccccacttacctgttgagttttcctctcattccaggtccttggatgtggctgtgttgcccaagctattctcagtcgaggacgttttggaggggtcatcactatcaatgttggattttcaatggcagttgcaatggccatttatgtggctggcggtgtctctggtaagcagtagaaataatgaatgctgctcttaattcagccactccaatgtgcccgcacagtgctggctgcttcacataccttaatttacttatatctcaaaaatcctgcaagagtgtgtattggatcccatttttatagataaaattaaaatcaccaaccaatggtaagtaacttattatgcaaaggcaacatttaacaagagacagaaatgggggttagagctcataaattattcattcctaagtctggccgctgcatcttattctccaccagtcaacgggattttttacttgctctagtccacatttggaatccaactcccagataccctgtaaatagcccagtgaaggtcactccaacagaggcaagtcctggacctttatctatagcaaacaggaagagtctgggtctcttgcaaaatggatggtgctttcatggacgtgcagatctgatctacaaggtcttagtctaatcctgctctgaaaagtaaactgattagaagccattcacatggttctcaaaagcaaaatgaaatgataatttaatgcagtctgggcacttaggaagcgactgtggaaatgatctggttaccaaagacactcagaatctttcagcagcctggtgtgggtcctcagagcattgagtcaagacttggtgagaagagaagaaagggaactgagaaaccatgcatgctgagcactgtgctaaatgccagactgcctttatctccctctcctttacaacagcactctgaggcgggtattactgtctccattctacaaagaaatccctcctgagagggagtcagtaaataagtggaagccctgcagctggtaaagaagaagagctgagatttgatccaggctcacatgatctgcatgacagtgaagctcacatcctcattttttgtttgtttgttttttgtttggttttgtttttttttaggagtcttgcttttctccctcaggctggagcacaatggcacgatcttggctcactgcaacctacacctcctgggttcaagcgattctcccgcctcagcctcctgagtagctgggattacaggcacacactgccacacctggctaattattttgtatttttagtagagacggggtttcaccatgttggccaggctggtctcgagctcctgacttcaggtgatccacctgccttggcctcccaaagtgctgggattacaagtgtaagccaccgcaccctgcctgttttttgttttttaagacagagtctcactctgttgcccaggctggagtgtcgtggcaggatcacagctcactgcagccttgacttcccaggctcaaacaattctaccttctgccacctcagccttccaagtagctaggactacaggtacgagccaccacacccagctaatttttgtattttttttgtagagacagggtcttgccatgttgcccaggctggtcttgaactcctggactcaagtgatccacttgcctcagcctcccaaagtgctaggattacaggcatgagccaccacacccagccaacacatccccattcttacacagcatttacaatgctctattatgagaagggcattacaagcaggttagttgggcagaggatcctgcagttaagctggctggcctcctagcaaacactgcctttgtagcactgaagaacgattgcttagactccttgggagctccttgggctgtgcatccggaatggccattgaccagctggcaccctttccatattacagccagactcagatccaagggtcgtccaggttaagacagagtcccactctgttgcccaggctggactgtgatggtgggatcacagaactttgcaaccttgacctcccagattcctatatatgtgatttgttagcatgcacagtgtctccattcaaacttttgtccagcttttgctgtgatcccagcactctactgcttaactcaaggcaaactccaagaagggcacaagaaaaaccaggggactgccctaaatatcccgaggcttaactgctccccctataagctcccactgagttcaccaggtaatgtaggtgtagccatattttcagcctttttttaggtagagacatggttttggagtattttgcctgcataacaccctgaactgaacatcatccaatagttacttagaattaattggccccagaccctaccactgctgttaacacccttcaccactgcaatccatatctgtttctgtccattgatatacctggggatttctgcagtcactgtaggaggaaaaaagggaaagaaccagcaggaagaagaaggagtgaagaaaaggtgtgaagtcttctgtggcctctaaactggggttgaatccctatagttacaagagtaagggccaaaactgatgggacttctttcagtagaagctgtttctgggtgagagtcaggacctgaccaaaatgtttacaagcaactatgagaccctaaaatacaaacagagtggtgtctgagactggctggaaaatagtagcactggcttggaaaggcagtccttatctttctatctctatttggaatctagcacagttcaggctccctaaggactggtggctttgggaacattttgggaacatgcagcacaacacactggcccatcatgacatctgtgtggacaacagcatcagtatcagctttggcaggtgcaggaataggggaagattgtgtgtgggaggtgactttctcatcgtggctgcagctaacatactggtttgtgggcacatactggcttgtaaggtctgcttgaagattccaaaagtaaccaatttatactgagcataaatgtgaatgggatcctattttgtggtcaccgactagtgaggtcagcagatatttgtcttttaaatataaaacatcaccttattgtaaagaagttacagcatcctgctcccctgggaatgttccagtcaaatccagtcagtcagaggtcataataccctaattatgtagcatcctgcacaaagcatttaggctgtctaatggcaattgctattgatgtagtattttatgactaaaataaacttattgaaaaagcaaatagacttgctttcattacaaaatatagggttatcttgatcacaggattgtgtatgggtggcgaggaggagaggatttgcatagaacagaacactgaaggggttccctctgctcacctaagactttcatcttgtgccctgtgggatccagctgtgcccgcgggccctttatgtgaataatctgattgtcccagcaacctcggcaaagccaagagttgagtgcaggactctctgactctagttctcatgttctttccaatacactgctctgccttgtccttgtgataagccagggtgaccactcatctctgcggggagaaatttctagcagccacttggcctctaaccagaggcatcagggtgccacttgtccacctctctttctgaacctttctgcctcctctccagcccttttcctcattgctttgcaaagcacccttccagacataccctctctaacccccaaacaactatttttctctgtagatcactgtagtctgagctatctaaataaggcctcagattatttcttcaactttcttttttttttttaatggagtcttgctctgtcaccaggctggagtgcagtggcataatctcagatcattgcaacctccgcctcccaggttcaagcgattctcctgcctcagcctcccaagtagctgggactacaggcgtatgccactatgcccagcaaatttttgtatttttagtagagacagggtttcaccatgttggccaggattatcttgatttcttgacctcatgatccactcgccttggcctcccaaagtgctgagattacaagcgtgagccaccatgccctgcctatttcttcagcttttatattgaatacctactaagtgccttgcatcatgtgagacccaaggtaaataatagttccagcctcaggatgcttaggaggagccaacaaacagaaacctacttatgggaaattttattttggaagacgaaattgttaaacaaagaaatctcccattggtagactaaactcaagggagttggactggaggtgatcacttacggcccccttggttttttgttgttgttgttgttgtttgtttttgtcgcccaggctggagtgcagtggcgcaatctctgctcactgcaacttctgcctcctgggttcaagcaattctcctgcctcagtctcctgagtagccaggatcacaggtgcgagccaccacgcccaactaatttttttttttttttgagacggagtttcgctcattgcccaggctggagtacagtggcaccatctcggctcactgcaacctccgcctcctgggttcaagcaattagcctgcctcagcctcccgagtagctgggaatgcaggtgcctgccaccacgcccagctaattttttctatttttagtagagacggcgtttcaccatgttgggcaggctggtctcaaactcctgaccttgtgatccacccaactcagcctcccaaagtgctgggattacaggcatgagccactgcacctggccccgcaccccttttcctttcacaatggctacctccaggcagctggaggcagctactctgcagcaagcctctgggagaagagaaacttcccactgccctgtgtgccccctcctccctcctaacccctgtttctagccttccctggtaaggtgtactgctagtctccagaactgtggctttcctggatttgaaaggaaaacacaacagttgaagtgtttataaggctttaggaaatcatctgtgcttcaatacactggcattttcttgctcattgtagccactgagtggcaggggcaggtgaagaaaggactcttgtggcttagccagcagccagaatcccccacccactgcaagtccattttgccctggagacttggaaaaagcatagctttctccacagggagtggtagaggcttctggaaacaagtgcacctattggttctgtgcaggatcatcatcatcatcatcatcatcatcatcatcaccaccatcatccctcctttgtttacgactaaggccacagcctgaaagtccacatctcaatgtggtgtctctgattccccctccacaaaaaatgtcatctgtattcctcaaatgaacatctgttttcactaggaagtgagcctatatgctcagacaatttttttaaattctttatttatttttctgcccacaaaagcagagaagcctttataaacacggtgaagatgggctggaagtggtatagcagaaaacataggctctagaattcagataaacctgaatctgaatcctggttcttccatttactgaccatgtagccttaagaaacttactttccgtccatgcctcagttttctcatccgttaactggagtagtactcatctcattgggttcttaagaggatcaaatccacctactaaccctacaatggtgtctggtaagtatttgataaatgctgctgttgttgttactagcaaagccagctggggatgttagagaccaaccacagagccaactctctatttgattttatggctggatgcaagtcaaggaagccgatttctctagctggagcttgggctgggctcaggaaagggttgctacatttctgtataggagagaaatgcattgtttatgcagaggaactgagaacaagccactcacactgtgaccacctcaaaatcaactatgcccccaccctcagcaacccacagtcattttcctttaaagatacatctcttttgagctagtttttatatcctctgggcatggccggaggaactgctagatatagatttaaatcttatacatatattggataagcatattgacttttaaaagatatcgaagttaatagctacatcagtctgtttggggtgattgctttatagatagagggattcaagcctattaaaaaaacagccacttgagcacatcaagtttctttttatacctgactctcttttcatcaagataaacattctaaactgttatccaaggatgccatgaaaatgatcattcctccttctctccctgctcagatacacactctctctttcacgtgcatacacacccctctttctcctcataggcagtagttctctacctagaagactgaattccacctgaggtctctagatggttttctgtatattcttcttcctaacctgccctctcacttctccaatcttcccttgcaggtggtcacatcaacccagctgtgtctttagcaatgtgtctctttggacggatgaaatggttcaaattgccattttatgtgggagcccagttcttgggagcctttgtgggggctgcaaccgtctttggcatttactatggtgagtaaagtccctgagtcctaaggttaggaagagctgggcataatttgaaagtcagaattacttggtaggcacaggcgagaaaaagcaaggacgggaagcattctacaagtgacagcaagttctaaatttgagaaaatgaggccatattaccattccagcaaattcgtgaatcctgttaatgaaaatggtcatatcttaaatggggagcagaacttaaaggaagcctgtctttgtgccaagccagcactgcaacatacacatccatacaacaagcagtaggccagtggcttccccactgctgtctctgatttggctgggaaaagaggtgttttctggtgacaaaggtgtgaccagtaagtattgagagaaggactctgggaagatgtctttgaaggaagagacacagcagagatgtgggctgggtgggagcctcattgcccttctatcaaacagccagggcttccactctgcaacagtccttgggaaaaacacagtattggtcatagaagaccagactttagctctagctgttcagtaaatacctgtgcaacttaaataagtcatctgatctgactagcctcagtttcctcctctggaaaatgagggaattgaatcagatgactctcgaggcctttcaaactaaaacaccttggtgttcccatgaaatcaactgttaaagcagctccttccttctaacccaaggtaagccttaatacattatgacttacccaaactgaagaccttaggaagtagaatttatgaaccaggccttatagaaatgggtcatggagggctgggtgtgtggtggctcatgcctgtaatcccaacactttgggaggcataagtgggaggatcgtttgagcccagtagttcaagaccagcctgggcaacatagggatacctcgtctcttcagaaaaaaaaattaaaaataagccaggtgtggtaactcacatctgtagtcccagctactcaggaggctgataagaggattgcttcagcccagatcaaggctgcagtgagccaggatcatgccattgcactccagcctgggcagcagagcaagaccctgtctccaaagaagaaaaaaaagaaaaaaaaaaaggaaaagaaataggttatggaaagggacttttccccatagagtgtctctctgagaattagagtctaaaagggctaaaatggaattcaagaacacacaggaaattcagagcccgctgctgtggcaagaatggcctggggtcagtgctagctgtggcagtggctgcaatacccctggctctaagggcatcttcagtatactgcaacaccctcaaattctggagtggtattaggggttactgagagccctctgggaattataaattattcctagagcaagaccaagccccactttggctttcagttgacctcgaaaactccaagaattcccccaaaagagaactcattcccaggaccctatcgaagaataatttgtccaagtttgcagtgggccattcagagaggccaaaggccttcttcctttgaccctccatcctgggattcacctgggcatctctaaaactatcattcctcggaagtagagagagacaaatgacatggctatgccaagctcaatctgagtgactggttgtttagcacaaggcttggcacaggcctccttcaactcttcccagggaacactaatgtgccagagctttctctttcatagatggacttatgtcctttgctggtggaaaactgctgatcgtgggagaaaatgcaacagcacacatttttgcaacatacccagctccgtatctatctctggcgaacgcatttgcagatcaagtaagtgtagattcaacaaagacttaactttggtgaaaagatatgctctcataaggggaatgcattggagaattagagaccaatcagaaaggagagattatatttccaaaggcagaggttgctgggcataacccaagctttcttgataatcgttttacctttacaaggagctgataccaccagaaaagttttctccttcctctttaatacgtacacttgtttaacattagttgagatccagaaaagagtgaatgactaaacatttcaatccctgtagacacaaatggagttcacttcactattgactcttttgaacaagtggtctaagtgtggaggccacaagagaagatatttctatttcaaatcaaagactgtgaagggtggtagttgagcctaggggatcatcaatcctctctgtctcaccatgtgcataggtttatttatttaaactctcaaggtggccagaagtatctctgcttattgacctttaaacaagcttctagcacccaagcatactgtggtgtaaccaatagcacacctatttggtcagcttatggcaggactaacattgtcaactcaaaagactcttcttcccttactgtgtcccaagaaggctgctggttatcttggtcagggcagtggaaggaaggctatatttttcagtatctctaagttcttcctctatgatcaggacttatacagcagatcagaatgggcatgtgtatcaaatggatcttccagttcatcagctatgcccacctccattcaatgtatggatgaaaaactatgccctcatgtcctcagcttttttactttccactttcatcaataaatcaaacaggcaacaagtgttcattaaaaactcactatgtgcttggccctttgtctggagcttgaaagactgacgagtaaatgtgagttgtaaagatccaagatgcagagtctgaatgcttgaattaaaatagctgttctgcctccaacttcctgcgtggcttcagcaaagtactgaactttttgggtcgcaagttattcacttgtaaaatggggataatatgagccttcatgaagttacttatgaggataaaaagaataatatgagaaaaacgcattgtaagcagtatctgcccagaaattttgaatctagttgaagagcattgaacaaggaaacaatgcaaaataagatataattagacagagctgggcacggtggttcacatcttactccctgcattttgggaggccaaggtggacaggtcacttgagcccaggagttcactaccagcctgggcaacatggcaaaaccctgcctctaccaaaaatacaaaaattagccatgcttggtggtgcttgcatgtagtcccagcaacttgggaggctgaggtgggaggatagcttgcacccaggagttggaggctgcagtgagctatgattacaccaccacacctcagcctgggcaaaaaagaagaaaattagataggaaactggagtatagcgaccatattataatagaaatttgaagcagagagcatagaagagcgaggacaattttggttattttggtgtttttctctaagctttttttttttttttttaagactgagcctgttgccccaggctggagtgcagtgacgtgatctcagctcactgcaacctccacctcccaggttcaagcaattctcctgcctcagcctttggagtagctaggattcccagtgtgagccaccactcctggctaatttttgtatttttagtacagacggggtttcaccatgttggccagactggtctcgaactcctgacctcataatccgcctgcctaagcctcccaaagctgtatcttgatcaatgctgacctgcataccatatcctgagcttccttcattgtgtccttgtctcagagtgagttggcaatttctctaaggtctgtggtttctaagcccattattgtgtatatagtcaagtagaaaaagcgaatattagaaaaccctgaggctgtaaccgtcagcaaaccctgaatgctgtccgtattcttaggctttggagagagttccaaaaattgccaattatcagtcagtcaacacccaacagagctcttggccatcatgaccatattttggggtcaccttatttcaagattactaaattgtttagctgtaaatactcttcaagcatattccttggtttagttaataatcaatcatttattcacccaataactatttactgggcacctacttagccaagtacagctctatactcttccttcttcaaggagttcagagtctgaggctcaatctaacaagtaagtagatactcttttgcagagtgacaaggacactgatagaagtaaagtcagaatgtcatggaagcccagaggagggagcttttactctgcaagagagagttggagaaggcattccagagaagagtgctcttgggggaacatgtgtcttttaatattaattaaaaattattttaacattattattttggaaagcagatgaaatgataatgaacttaaactttaaaatcagttgcctggttcccatcctgattcttctgcttacaagtttgacattggacaagtgtcttaaccttgttttactcgagttttcttatctataaactgagaataatagcaggatttacctcacagcattactgtgaagatttaatgagataaagcatatgaagtacctggcacataataaatgttcaataaataatagctatcatttaactgttaaagtaaaacagtagtttggaaaactaataacatagaaaccagctataattggccaattcaaatacctattatcatttttgtttattgtcttaaaatttttcttttacgtatgtttttaagtagagtcaaccctacatatccatgaattctgcatccatggattcaaccaaccatggatcaaaaatatttttaaattgcatttgtattggacacgtacagacttttttcttgtcattattccctaaacaataccgtattcacattatatcagatattataataatctagagatgatttaaagtatacaggaggatgtgcataggttatatacaaataaaacacaattttatattggggacttgaacatccatggatttttggtacttgcaggaagtcctggaaccaatcccccacagacaccaagggacagctgtataaaacacaaaacaaaacacaaacacaaacaaaaaaatacaaatttttttcacttaatgttataagtatttttaaatattactacatagcttttatgtttatagtttttaatggctatacagtagactaaaaaaagagtaaaagcttccagtttttcagtactataaattttgctaaagtggacattttaaaatgatttttccacgttttagattatttccattgtgtaattctcaaacatccagcagcatcaaattgtataaataaatttatgtttttgaatgcatattgctaaattattgctgaatttccttttaaaagcatagtacttgtttagatctattagaaaagcctgaaataacgggtatctttttcctaacatttgatattgtttggatttattttattactaatgagtttttaccactgctttcctaattctgttttccttttttgaattttctgttcacttcctttgcacactcatctattgatatctcacattgcttttctcaccaatttgaacaagcctttcattcatttttccagcctgcagcttgccgttctacttagctgagtagtagcttagcaggatagtgtggtattaagataacagtctctggagccaaactctctggatccaaacctgactgccacctactaagtgggcagggtaaccaatctgtaaatgagaattatattggcttctcctctagaattgctgtagaaagaagagagactggcacaattattcacccagtacatgccagttattactaggcatattgtaatataagtaaaatagtaatattgtaatattgtaaaatagtaagaagggatgattttgagacatgcaggtgagcagaatgcaggctaaagccctggctcaacttctccctctccaggtggtggccaccatgatactcctcataatcgtctttgccatctttgactccagaaacttgggagcccccagaggcctagagcccattgccatcggcctcctgattattgtcattgcttcctccctgggactgaacagtggctgtgccatgaacccagctcgagacctgagtcccagacttttcactgccttggcaggctgggggtttgaagtcttcaggtaagtaacagtggtggggaagagagagacagagtcatgctgcgcctcaccagtggggcggggctttgacatggagatccagggaagttcagatgacagcgccaacgttaactgcacactctggtcataagcatgagacatttcactggtattttgtggtatgatgtgtgtgtgtgtgtgtgtgtgtgtgtgtgtgaaagagagagagagacagagaaagagaggcggctctaggtaaattcaatagagataaaactgtcccacataataataatccctcaattgctatatgattttatgtgaacattttagctgtataacttgtctgcagattcattgtgtgacaaagttgggctacaatttgcatcctatgatgccactacagggctcttcctcgtgaaccacgcaacctatgctgcacttattccacagatatttgttgggcattatctgtgctttagtcactgtgctaagcaaggaaatttcaaatcagcaaaagcactcaccttgagcgatataataagtgctctggcaacccctaaaagtgctgcaggaacacagataacgtgtgagtaactgccagggaagcagggaaagacatgactgcaaatgtgagagctgacttggttctggagatatgagtaagaacttccggacaggacagatgtaagattgagcctctgccccagaaatggcaagactccacactttctacttcagaatgtgctgaggaaatacgccaactgttggtacctatcttctaggacaaaatttgccccttcactacttcctggtttccctgcatgcagtcacagaggcgcatcctcatccacccatggcaacttcctatggggaaggagctcactttggttcatcaggaaacagggctctaccatggagaaaagtaggaaaaacatgtgtgagcaaattctactttaatgtttcctgtgagaacaaaggacgtgagtgttcccaaatgatgacctagacatagagtcatcagggtttggcctgcatttcaccagggtgaaaaataagttaaaataactggtaccattgagatcaccaccacagatagcactcagagcatctagagtgtaagtgccatgagtaccttgacagccttttcccctggtatatccacagtgcctagaacagggtgtagctcatagaaaggctcaataaaaaggtattgaataaaagaatgaatgaattctatgtgacggacacttcctaggagttgaaggatgcaaagcaactcagtcaacattccctgtcctcaagaaattgacaatccaataaatttcctagaacagcagttctcaaccagaggtgggcaactgttccccagggcatttttggttgtcacggctggacctgagggaaggggctgctactggcatctaatgggtagacgccaggaatgctgttaagcatcctacaatgcacacggcacacctcccacaacaaagaattattcagtccaaaatgttaataggtttgtggttgagaaattctctcctagaatgatcacaactagaacacgaaaatgtccgcaactaggatggatctcttgtatctttccaatggagcatcaaaaacatatgtcctaaggatctccttattcccagagcccagaattcgcccatgagtttcccttaattccaccatccagagtctcagtcttggagaccaagctcttcttccaccccctttgagacctccttggtgattcattcaaaagtcaaagagacatggtggttccaaaacagatggagatcttgcccaatgtccctttgctctgttaagtatatgttaggagaactcatgtgaaggaaaatgttggaatcacctaatgtcccatgtccttagctagcatcaggatcttttcccttccatggagtcatttattcattcatgcagctacttgatatcttactcaaggctctccactaaagatgataagacctagtttctgtccttcactgttgtgtttatattctacttaagaggttattccagaagctcttacacaaggtggaagcagtcaagtgccattaaagagatttgactaattaactccaggagtttagaggtctacagctccaaatttaagaattatgggagtggaagtgggaacatttatagtatttggatatgcttaaacaagcaacagaggggttatctcaggcagagagaaccgttattcaaagacacaatgttaaaatcacaagtgatctagtctagctggaagggtgcagaaagaaagttggaaagggccgttgtcagatcatagaggacctggactcccagaatgagaattttggcttttcttctgctccctgttttgtaggttatagggagtagcaaagtatttggggcagaagtttggcaggtttagaatgtcaatttagcaaaattaatctggcatcatcctataagactgattgaaaaaggagagagtggggaagtagaaacccattaggaaagagcagggttggctggtaatcctcaaccaaaaatttctccccaaaacctttgagggacaacaggcttccaaagtgttcttagagtgtctcatttcctcagagttctatattcaagggaaatccctcagtagatatcctagcttggacctacacctaaggtcttagaaaaaaaacaaggctaccttgttcccaggtccccatgtactcctgaacggcaagcagtggaatgatggcaggtacagcgagatgccagagggtttgatgagggcaagagtcaacagaccctggccaaagactcttggtttttcctttaaatgttaagatgtttcccatcaaatttctctccacttattcacattgttaatgacttaatcagtgaaagctctcaggagtattattaaatttttcaaatagttggcccaaagtattgaatccctaaagatggtcctttagacagttaacatacacatgttcctggcatctcccgaatcatagtgtgcaaatgatcactatttgtgtgcatataggactaggctaggcaggtaaccacatctgagcgcctccatttgtgacttgtgaacctgatacaacatgtccaatctgataaaagaaaaagcatccagccagtgaagaggacatgtaccctggctgatatcttggaccttcatctgctaaatgacaggaagaaatttgccataaaaggaaatgatggacccaacaggtagcttatactcccttcatgttttgacctctagagaagacttcaagtctttacagccaaacgggagaggcagccaccctccatgtgcctcccctagaaaaatccatctggatttggggcctggggaagggcactgtgagggcggccgagtacagcatcctcgctgccgtgtggtaagagtgacatctggtggctgccatgctcaggctcagtgctcttccatcaaccctgcaagggcaatggaggacttcggagaccacttaggtgccccaggtggaagggaccatgcagatgaaggaaatggagctcacgatggggaatgggggtttgatttgctcaaagaccttctagataatcttgagattagacttagtctcctggattctaggacagggttcttgtgtcctgcttatttcctttatcgttctttctaatcaaagtttgagatatacaaaaggccacatggaacatatgtgtagttattcagcataatgatgaaaagaaaagctatgggtccttctagaatccaactagaacactgaaattcttacatgcctctgggtactcctcttgtctcccatcccctctgcatttatcctgaagttttgtgtttaccattcccccgctttttaaaaatacttttatcttaaatgtatatatccttaaacaatatactgtataatttgtttgctttcctgatcctttctaagaaattatttacatggattttctctctccaaagaagatggtgacaactcacaaagatacctgcttttccccagaactatagctttgctgtaatgtactaacattgaggatttctggaagagagagagccatggcatgacagccttatcagagggtagcctcaagctaagatcttaaaaaataagtactgatttaaattatatttagaaggcaattcacacatccaccttagattttttaaaaattcattcattcattgaaaaacatttcctgattgattagtttgattgtcctcatacactaatgatgcccaggaatctctccacattctgcttgtaatccacaggaatcattatttcaggatgagggaaaggcaattctgaataattgacctgaactttcttaggggccctcaatcttaacgatgggctcaggcactatattttataaaaagaaaataaataagacataatatctcacaaatattagtaggacaattaaatagatcatctgaaatcaggtgtagtggaaagtcaaggatggcagttgccatgctgcactgagccccccttatacttagctcttgctgagttaagagggaaccatgagtgtgagaaagactaacaagtgagtgaaaaaactagacagtaataccaggaggaaggccaagaaatgtatcactaatttcttgtttgatttcagagctggaaacaacttctggtggattcctgtagtgggccctttggttggtgctgtcattggaggcctcatctatgttcttgtcattgaaatccaccatccagagcctgactcagtctttaaggcagaacaatctgaggacaaaccagagaaatatgaactcagtgtcatcatgtagtggcatgctcagctctggatttgcagtcagtttgggattctcttcagaaagatggcatctaagtgtctgtgttcttgtaagcctgaggtggaatccacccagttttgtctgctagccatatgggacatctaattggaaaagcatctgcataaaagtttggaaacaatgaccacttctctaccattgtcccccacccccaccccccagaataacgctgactgtcccctgaaacagccttctctcctgccctgtttatttcatcctcgatgggaattcttgctaggtaagcactaataactcggcatcttgacgatagtcccatttgggtgtttcagctgcactatctgtatgaaatggtgtcaccaaaaccttttcttcagtatcgacaaagattacattctgagtaccaaccaaaccctaaattgaaagacaaaactatggtttcagtcaacatattcatgaattagggagctaatgggttaagcttccagttcccgctatgctactggatttgtataaatactgatattctccaaacctagtggtgtagggagcaagagaatgcagctggaaggcacaaggggaggacattgtggcattcagaaactgcaggagacaagatgaatttgagaagccaaatggaatttttaatggaaaccatttatcagattaatctcttgctctcctgcattttagaggacaccaattaatttcctggtctttagtatataataacctaaaataccattgtaacctcagtcatgaaaaatacatcactctgtctttttagctcaaatgtattttcctaattgcccacttgagaacagacatttgacaagttatatcaacgactgtgcttgtccattattttacacatgccctagaagccaaaactgaaagccactggatcctggtctagctgaatcttcagagtgggaggtctccaaaaagatattaccttattgggcttaacaattcacaaggcactttcacacccattatctaatttaatcctcataatgactatgtgaggcaaatgccacattgcccatttttcagataaagaaacaaaatcttagggaagataagttgagttgtccaagagcacactgaaagttgaatgttatctaatgcattcctctacctttcagaagatcagtagctggctgagaatctttgccaaatcttccttgctagccagaagtggaattggcagcttctagaatatgtacacctctggacaaaatgttcctcaatcttaagatacaaagaccctcattgtctgggtctattcccacacttactgagtacagatgaaggaaagtggtagcaatttaatcataactttcatttgctgaaaaacattatgagaaggcctcccttcctaagccacctctggtcttgctaagtcttgatcttgcttcctgccagcaccaaacattacattcaggggatttcctctggctcagtcttttccccttgaagttctctaatagatgttacttttgacaaaagatcgcctatgagttacaagcaccaggggatgctctacatcaagggatgcaccttcagtcaaactgtcaaaaagcccagaattcccaaaggcattaggtttcccaactgctttgtgctgatatcagaacagcagaaattaaatgtgaaatgtttctgatgacttatgttctacaatctatggacatacgggatttttttttcttgctttgaagctacctggatatttcctatttgaaataaaattgttcggtcattgttggttgcttggttggtttttataagtattaagattactaagtacgtctagttcagaggttgtctattgtgtctacaaatttgaatttcctgggggaacttttgaaaaaatactggtgcccagttggtcctttgtaaacatctcaggtgattctaaaatgcagcaagggttgagaacattgacttgggtaaatcacacgggtctaaagtttctttgaccatgtccagtagtggccaggtaattcctagcaggattccagagtcttgggatcctcatggattagagcaatggttttcctccctccctacttctaaagggaacatgtggcaatatttggagacttttatggttatcacaactgggaaggggatgctaatggcctctagtggctagaggccagggatgctgccaaatatcctacaatgcaaaggcaaccctcccaacaggtaattatttggcccaaaatgtcaataatgctgaggttcggagatcttggtgtcgaggaaaggtagggaggggagtaagagaagacactgaaatcctgcaccttgattcaagttcagtcaggagcaaaggtgccagacaaaccaggaacaaaccctgggggtggactataattcttaaagcaagaggcaattcaaaatttgagttttgaggatgaactgtggaatctatgatctacacaggtgctcattaaacacaatttgatgattgatgactaggatttataaacaggaaatgtaccattatggaaatcaaccccaggaagaattttttcaatggaaaaaagtgcttttgttccaggtgctcacactcaaattctctccccacccctacccccatttacaaataagtggatttacctttgtggagttattttccaagagaatgtttatatggttgaattatctgtatccgaagtcaactagatagagccaacttatccattttttaaatagttgctttaagagttagaattgtaacattcctccttccctccccctcatgaatcgaaaaacttgatagaagcatttatcttaatgccaaaaatataatttctctgattctttaaccagttgagatctcagagcatgtcaaaggttgcagggcttttctaaccagtaacaaccagtcaatattcagctgttaaacaggatactccacataaaaatgtcatacgtaaaatgttatccttaggatataaattattatttcctttaaattgcttacacacacacaaacacacacacacacacgtcttactgtaaggtatattgatgttcaataatatcgtcatgggaaaaaaatacatcttccagttagagagaatggtttataagttttatttagccacagaacctgtcgttcaaataaaaccttatatgacacccacaagtgaaccagaattgctataaataaaaaaagggagggggatcaggagcttcattctgcttgtgatatcatcttaaaaacacacccccaatgcagcccctaaggggtctctgaagagaaattgtgtgtgtgtgtgtgtgtgtgtgtgtgtgtgtgtgtgtgtgtcagggctgggggtggggtttcagaacacagtgtcacagtttgaaaatcattgataaagacttgggataagttgttggtgcacacttttatgaaagtttcaaggatataacctacaaaagaccatattaacttaatctcaggtcttttccaaagactttttaataaatgaattagacagggtgaacagaattactcaatccagcaaacatcacccacaaagagatgtggtacatcagtcctcaaactgggaatttaagttctctgtgacaacatgtttactaatcacagcccatacacagaagcaatggtactcctggtcacacttactgtgttgactgtctaagtctgtataaaaataaatagatagatgatagacagacagataggtaagcaaccaaccatgctccaatctctttcttattgctggaaatggagtagctcttattcaagagatgctgtctctggattagtgaaaagagggcaccaggcaaactgaacatgaatccacagaactctgtgtggatggagatgctgcccaagccagttggactctgtctctctccagggctaccttatgtttctagtagctttcgacacttttgcctttgtggacctctcgccacccctgaaagtatcaattaaaataaatcgttttgtaattgttctggtgacaagctcgattatattctttttttctggatgtgatttcaggagatatttaagccttcccatggtctcttagtagcatgggttccagacatagcgcccagtaaggaagtcctactatctgccactgcctccctactctagcgcgccccccctgtgttccagagcccctcacacgcagccccttcctccacggggccctcaactccctcactgtggggtcttaggaaacactgcgggagccctgggagtcctgaaggttgtgagggacgctccagagcccagaccactgttcatggggatcggccacgtcgtggcactccgccctccacctcaggctcccagcaggagagtggcttcctgacttccttcctgcagaggaagcagggcggtccagggcccgagtacccccgatgcaaaggtcctgcgtaacgtgttattaaagaacaattcttgtgctttaattcttagtgtctcacagttcacaaagcacgttcatatccaggacctctaagactctcagaacagctcagcaagtagattattatctccacttagagatagggaaactgagagtcgaggccttaaacaatttgtaccaagttccggagtgaagagtgaaagaggtgggatgcgaaccgcgtgtctgagtggggtgaccaaccatcccaggttgcttggaactcaagcgtttcctgggatgcaggattcagtgccaataccgggaccattcggtcaccctccgtcctgagccaagactcctgcacttcccaccaccgagcctccttgcagacaaatggtctcctttgggctcattgtcttgcagcagataaaatgttctttgattaatttaacagaaacagagaatgtcttcatttttaatttcaattataaatgtgaataaatattttaagagtggcacagtggtttagagaataggctattaatgaaaattctgtcagttctaccttccatatatattccaaatctgacctcttctcacacacagccctagtctaagccacggcctctgtctcttaggtcttagaaaagcctcctaataggtctccctacctttctgcttaaactcctgctgcctgtaatcaacacagcagcctgcatgatctttagataaaagcccaactgtacttagaagtgtcacatgctctgaccttcctggcctggtctttactgccctcccctttgtctgtcgcctcagctgcagcgatacagacttccatcctgatccttgaacccaccaagcaagccccagccacagggcctttgcacctgatgtctttcttacttgaaattccctaccccacctctttcgggtgcctattcgatgtcactgttagtaaggtctttctgatcacccatcaccctctacccactttcctgatttatttttctccccagcacttaccacgctccctaaaatacacacattttgtattaaacttgttggattttgtctgtttcctcctggtggaatagaaggtccatgctggcaagacgttttgctctttaattctccacctctgccccagggcctagaacatggtagttgctctatgaaaattagttgaattaatgcagtacagagtcatcctctctggattcgaatcctagttcctctacttgttagtacagtagccaagttagttagcctcagttttctcatggatgaagtagaaataataacagtgagataatcaaggtaaagttcttagaaaagtcccaaccttatagtatatattatataaacatgaactgttgctgccacagcatctgctgttgttattattactgatgtcattataatatgtgggagtgtgaaaacatggaataatgtcattaaaatttggttacaagctcttcccttgctttttataattcaatccttctcagttgcacatttctttcaggaactatctttcaagtacctaaggtttcagttttatttttcaatctttaaaacaagtcagtaggattatcttattttattatgaaagatttaaaaaatacacaatagacagaaaatggtataatgataccccatgtacccttcactcagcttcaacagttgccaaaatattgccaataatgttttacttattcaccctctctgcttttcacttctccccctgggatttttttgaagcaaatcctagacatgataccattttacccatgaatatttaagatgtatttctaaaagataagaattctttttaaaaacataaccacaataccattatcacacataaactaagtatcaataatttctcaacttcttaatatcatcaaatacgcagtcattgtggacatttccagtgagactgccctttgttgttgctgctgtttggtggagagtatctcgctatgttgcccagtctggattcgaaatcctgggttcaaggagtctcctgagtagctggtactaaggtacacaccaccacacctagctgagactgccttttaactctggcatgtaacaatgtaggttctgtaaaggttgaaaaccagtgagtcactctgacgtctaatggctcaggcaaaatcagggttttgcagcaacagtttgggactcaagggtttcctgggatgcagcattccatgccaataccaggaccagttggtcaccctccatcctgagccaagattcctgcacttcccaccaccaaccctccttgcagacggatgctctcctttgggctcattgtcttgcaccctcagatttgtaccttcctgtccaattctataagatttttgcaaaacattttaattttgatgcaaaaaggaaaatgcatttgtctgctactactaaaaagtagccatctaccaggagtaaagttatgtttaagcaaggaggaagtcctgcatttatttgaaattatggaaaatataattaacaattattgttacactaagaaatccacactatacaaaatgcttatacttcaaatggtaaaatatattgtgaaaagagctccaaatatttaacatctgtgcagccctgtgagtgacactgtgagtgattaaggcaagcgaacacctagaaaatcctactataacctatggtagtagtacttatttgatatttatatatttattcttacccaaagacttcagacctttggaaatggaaacgtatacaacagtggcacaatacttctaggttccaacattttcatgaaggaaatcacctttatctagagaggattttgatggcccttggctggctgatctgtggtgatattctgataataagattttgatctaacggaggatacagttctagtcaaaaatcacctatagatcatgaagaagcgaggaccatgcattgcccatcccagagcctgttctcagcctagaaccataaaaagaccaaataaaaaaaccagcagagaattgatgtttcgttgctgatgtgattatctttggaataagaccatgggggcattcaactgctaacacattggagactgtgtagctagtgttcaaaatgtcaggctctagagactgtcagattggattccagtccaccattgaatagctgtgtgaccctaaacctcagcttcctcatgcattaaatgggaataatactagtacttgtgtcctataagttattgaaaatattaagaaaatgcctgtgaaacctgtagcacaatgcctggaatttacttccctcttaatacttcttagctaattctgctattattatttcacatttacaaattcagctgtatatttgtgtgagaatgtgaagcccaagaaaattttccaggaatatgaatttgctaacacctaaataatctaattaatatggctggcttagctttgagagttttcttaatatactcaggtgcaaagaacctacataaggctgtgcttagcttatgaattacagagtttagttttgataaattaattaaacaaattatttagttgcctaatggagctgccaaattaatctgaaaaatctatcaaaaataaatgatgatttacagagttaatgaaagtcccaataaaaatcagcaggctattttttggagaaattaacaagctgactctaaaatttgtatggaaatacaaagtaactagaaaaaaaaaaaacaaactaggaaaagagggaaaacataggaaaagttaggctatttcaagactttctataaagccatgctaatcaggacagtatactattagtataggaaggaataaatagattaatgaaacataatagagcatccataatttgacccatgcttatacagtaaattgattttgaataaaagtagctaatgcagtcctgcggtgaaaggaaagtgttttcaacaaatggtactgaacaactagaataaaaggtaaatcttgacttctacttcacaaaaacataacagaaaatttaactgaatagggatctagacttaaaaataaaacttaaaactataaagcttcttgagagaaatatgggagaatatttgcaaccttgggatgggcaaaggtttcttgtataagaatacaaaactataaaaaatagatcaaatgtatgtcaataaaacttaaaacttctacccactaaaagagatcattaaggaaatgaacaggcaagtcacagactggaaaaaaatgtttgtaatagctgtatctaacaaaggtaatgcactcaaaatatatgaactcacccaactcaataaaaaagacaaaccaatttttaaaatagactatggatgtaaacaaacaggcacttcattaaagaatacatatgaatgaccaataagcacattaaggaagttcaaattaaaatcacaatgatacaccatgttgcaggcattagaatagttatctttaaaatatactggagacaccaaacagcagaatgtggggcaattgaagccctcatatattgctagtaaaagtgtaaaatggtacaactatttcataaaaatatttattataaaggtaaacttacacctactccatgatcttcaattctactcccaagtacttaaccataaaaagaccaaatttaaaaaaccaacaacaaaaactgttatgcaagaatgtttatagcatctgcattcataatagttccaatctggaaaatggaaactgcttttgaaatttccagatttcgaatatttggaatccaaatgtgcagcaacannnnnnnnnnnnnnnnnnnnccttcatttcattatgtacccagtagtcactcaggggcaggttgttcagtttacatgtagttgagcagtttttagtgagtttcttaatcctgagttctagtttgattgcactgtggtctgagagatagtttgttataatttctgttcttttacgtttgctgaggagtgctttacttccaactatgtggtcaattttggaataagtgtgatgtggtgctgagaagatggtgtattctgttgatttggggtggagagttctgtagatgtgtattaggtccgcttggtgcagagctgaattcaattcctggatatccttgttaactttctgtctcgttgatctgtctaatgttgacagtgtggtgttaaagcctcccattattattgtatggaagtctaagtctctttgtcagtctctaaggacttgctttatgaatctgggtgctcctgtattgggtgcatacatatttaggacagttagttcttttcgttaaattgatccctttgccattgtgtaatggccttgtctcttttgatctttgttgatttcaagtctgtttaatcagagactaggattgcaatccctgctttttttggttttccatttgcttggtagatcttcttccatccatttattttgagcctatgtgtgtctctgcacatgagatgggtctcctgaatacagcacactgatgggtcttgactctttatccaatttgccagtctgtgtcttttaattggagcacttaacccgtttacatttaaggttaatattgttatgtttgaatttcatcctgtcattatgatgttagctggttattttgctcattagttgatgcagtttcttcctagcctccatggtctttacaatttggtatgttttttgcagtgcaggtactggttgttcctttccatgtttagagcttccttcaggagctcttgtagggcaggcctggtggtgacaaaatgtctcagcatttgcttgtctgtaaaggattttatttctccttcacttatgaagcttagtttggctggatatgaaattctgggttgaaaattcttttctttaagaatgttgaattttggcccccactctcttttggcttgtagagtttctgccgagagatcagctgttagtttgatgggcttccctttgtgggtaacatgacctttctctctggctgcccttaacattttttccttcatttcaaccttggtgaatctgacaattatgtgtcttggggttgctcttctcgaggagtatctttgtggcattctctgtatttcctgaatttgaatgttagcttgcctttctaggttggggaagttctcctggataatatcctgaagagtgttttccaacttgattccattctccccgtcacttcgaggtacaccaatcagacgtagatttggtcttttcacgtagtcccatatttcttggaagcttcgttcatttctttttactcttttttctctaaacttctcttcttgcttcatttcattcatttgatcttcaatcactgataccttttcttccagttgatcgaatcggctactgaagcttgtgcatgcgtcacgtagttctcgtgccatggttttcagctcagtcaggtcatttaagttcttctctacactgtttattctagttagccatttgtccaatcttatttcaaggtttttagcttctttgcaattggttcgaacattctcctttagctcccagaagtttgttattactgatcttccgaagccttcttctctcaactcgtcaaagtcattctccatccagctttggtctgttgctggcgagaagctgcgttcctttggaggagaagaggcactctgctttttagacttttcagcttttgtgctcttgtttttccccatctttgtggttttgtctacctttggtctttgatgatggtgacatacagatggggttttggtgtggatgtcctttctatttgttagttttccttctaacagtcaggaccctcagctgcaggtctgttggagtttgctggaggtccactccagaccctgtttgcctgggtatcaccagcagaggctgcagaactgcaaatattgcagaatggcaaatgttgctgcctgatccttcttctggaagcttcgtctcagagggggcacctggccgtatgacgtgtcagtcggctcctgctgggaggtccctcccggttaggctactcaggggtcagggaaccacttgaggaggcagtctgtccatcctcagatctcaaactctgtgctggcagaaccactactctcttcaaagctgtcagacagggaagtttaagtctacagaagtttctgctgccttttgttcaggtatgccctgcccccagaggtggagtctacagaggcaggcaggcatccttgagctgcggtgcgctccacccagttcgagcttccagttcgagcttccagtttgagcttccagttcgagctttggggctgctttgtttacctactcaagcctcggcaatggcggatgcccctcccccagcctccctgcagccttgcagttcgatcttagactcctgtgctagaagtgagcaaagctccgtgggtgtgg

SEQ ID NO: 161 - DNA, 2748 bp, Homo sapiens
agtaccttgagaataaaggtaatgattaatctgtcaggcacaaaagggattgttttggggatttcgggttctaagtcgcagattcaaacaaatagcagcgaacagggaatgacagttccaccagaagacgattaagccacagcctctaattggaacggcatttgtacagtcagagactcttaccagacatctccaggaatctgtgagccattgtcaaaacgtccattttcatctggctgtgaaagtgaggaccacaacaggtaggtattggtagaaacaggagtcctcagagaagccccaagatgcagcctgagggagcagaaaagggaaaaagcttcaagcagagactggtcttgaagagcagcttagcgaaagaaaccctctctgagttcttgggcacgttcatcttgattgtccttggatgtggctgtgttgcccaagctattctcagtcgaggacgttttggaggggtcatcactatcaatgttggattttcaatggcagttgcaatggccatttatgtggctggcggtgtctctggtggtcacatcaacccagctgtgtctttagcaatgtgtctctttggacggatgaaatggttcaaattgccattttatgtgggagcccagttcttgggagcctttgtgggggctgcaaccgtctttggcatttactatgatggacttatgtcctttgctggtggaaaactgctgatcgtgggagaaaatgcaacagcacacatttttgcaacatacccagctccgtatctatctctggcgaacgcatttgcagatcaaagctggaaacaacttctggtggattcctgtagtgggccctttggttggtgctgtcattggaggcctcatctatgttcttgtcattgaaatccaccatccagagcctgactcagtctttaaggcagaacaatctgaggacaaaccagagaaatatgaactcagtgtcatcatgtagtggcatgctcagctctggatttgcagtcagtttgggattctcttcagaaagatggcatctaagtgtctgtgttcttgtaagcctgaggtggaatccacccagttttgtctgctagccatatgggacatctaattggaaaagcatctgcataaaagtttggaaacaatgaccacttctctaccattgtcccccacccccaccccccagaataacgctgactgtcccctgaaacagccttctctcctgccctgtttatttcatcctcgatgggaattcttgctaggtaagcactaataactcggcatcttgacgatagtcccatttgggtgtttcagctgcactatctgtatgaaatggtgtcaccaaaaccttttcttcagtatcgacaaagattacattctgagtaccaaccaaaccctaaattgaaagacaaaactatggtttcagtcaacatattcatgaattagggagctaatgggttaagcttccagttcccgctatgctactggatttgtataaatactgatattctccaaacctagtggtgtagggagcaagagaatgcagctggaaggcacaaggggaggacattgtggcattcagaaactgcaggagacaagatgaatttgagaagccaaatggaatttttaatggaaaccatttatcagattaatctcttgctctcctgcattttagaggacaccaattaatttcctggtctttagtatataataacctaaaataccattgtaacctcagtcatgaaaaatacatcactctgtctttttagctcaaatgtattttcctaattgcccacttgagaacagacatttgacaagttatatcaacgactgtgcttgtccattattttacacatgccctagaagccaaaactgaaagccactggatcctggtctagctgaatcttcagagtgggaggtctccaaaaagatattaccttattgggcttaacaattcacaaggcactttcacacccattatctaatttaatcctcataatgactatgtgaggcaaatgccacattgcccatttttcagataaagaaacaaaatcttagggaagataagttgagttgtccaagagcacactgaaagttgaatgttatctaatgcattcctctacctttcagaagatcagtagctggctgagaatctttgccaaatcttccttgctagccagaagtggaattggcagcttctagaatatgtacacctctggacaaaatgttcctcaatcttaagatacaaagaccctcattgtctgggtctattcccacacttactgagtacagatgaaggaaagtggtagcaatttaatcataactttcatttgctgaaaaacattatgagaaggcctcccttcctaagccacctctggtcttgctaagtcttgatcttgcttcctgccagcaccaaacattacattcaggggatttcctctggctcagtcttttccccttgaagttctctaatagatgttacttttgacaaaagatcgcctatgagttacaagcaccaggggatgctctacatcaagggatgcaccttcagtcaaactgtcaaaaagcccagaattcccaaaggcattaggtttcccaactgctttgtgctgatatcagaacagcagaaattaaatgtgaaatgtttctgatgacttatgttctacaatctatggacatacgggatttttttttcttgctttgaagctacctggatatttcctatttgaaataaaattgttcggtcattgttggt

SEQ ID NO: 162 - protein, 193 aa, Homo sapiens
MQPEGAEKGKSFKQRLVLKSSLAKETLSEFLGTFILIVLGCGCVAQAILSRGRFGGVITINVGFSMAVAMAIYVAGGVSGGHINPAVSLAMCLFGRMKWFKLPFYVGAQFLGAFVGAATVFGIYYDGLMSFAGGKLLIVGENATAHIFATYPAPYLSLANAFADQSWKQLLVDSCSGPFGWCCHWRPHLCSCH

SEQ ID NO: 163 - DNA, 2966 bp, Homo sapiens
agtaccttgagaataaaggtaatgattaatctgtcaggcacaaaagggattgttttggggatttcgggttctaagtcgcagattcaaacaaatagcagcgaacagggaatgacagttccaccagaagacgattaagccacagcctctaattggaacggcatttgtacagtcagagactcttaccagacatctccaggaatctgtgagccattgtcaaaacgtccattttcatctggctgtgaaagtgaggaccacaacaggtaggtattggtagaaacaggagtcctcagagaagccccaagatgcagcctgagggagcagaaaagggaaaaagcttcaagcagagactggtcttgaagagcagcttagcgaaagaaaccctctctgagttcttgggcacgttcatcttgattgtccttggatgtggctgtgttgcccaagctattctcagtcgaggacgttttggaggggtcatcactatcaatgttggattttcaatggcagttgcaatggccatttatgtggctggcggtgtctctggtggtcacatcaacccagctgtgtctttagcaatgtgtctctttggacggatgaaatggttcaaattgccattttatgtgggagcccagttcttgggagcctttgtgggggctgcaaccgtctttggcatttactatgatggacttatgtcctttgctggtggaaaactgctgatcgtgggagaaaatgcaacagcacacatttttgcaacatacccagctccgtatctatctctggcgaacgcatttgcagatcaagtggtggccaccatgatactcctcataatcgtctttgccatctttgactccagaaacttgggagcccccagaggcctagagcccattgccatcggcctcctgattattgtcattgcttcctccctgggactgaacagtggctgtgccatgaacccagctcgagacctgagtcccagacttttcactgccttggcaggctgggggtttgaagtcttcagagctggaaacaacttctggtggattcctgtagtgggccctttggttggtgctgtcattggaggcctcatctatgttcttgtcattgaaatccaccatccagagcctgactcagtctttaaggcagaacaatctgaggacaaaccagagaaatatgaactcagtgtcatcatgtagtggcatgctcagctctggatttgcagtcagtttgggattctcttcagaaagatggcatctaagtgtctgtgttcttgtaagcctgaggtggaatccacccagttttgtctgctagccatatgggacatctaattggaaaagcatctgcataaaagtttggaaacaatgaccacttctctaccattgtcccccacccccaccccccagaataacgctgactgtcccctgaaacagccttctctcctgccctgtttatttcatcctcgatgggaattcttgctaggtaagcactaataactcggcatcttgacgatagtcccatttgggtgtttcagctgcactatctgtatgaaatggtgtcaccaaaaccttttcttcagtatcgacaaagattacattctgagtaccaaccaaaccctaaattgaaagacaaaactatggtttcagtcaacatattcatgaattagggagctaatgggttaagcttccagttcccgctatgctactggatttgtataaatactgatattctccaaacctagtggtgtagggagcaagagaatgcagctggaaggcacaaggggaggacattgtggcattcagaaactgcaggagacaagatgaatttgagaagccaaatggaatttttaatggaaaccatttatcagattaatctcttgctctcctgcattttagaggacaccaattaatttcctggtctttagtatataataacctaaaataccattgtaacctcagtcatgaaaaatacatcactctgtctttttagctcaaatgtattttcctaattgcccacttgagaacagacatttgacaagttatatcaacgactgtgcttgtccattattttacacatgccctagaagccaaaactgaaagccactggatcctggtctagctgaatcttcagagtgggaggtctccaaaaagatattaccttattgggcttaacaattcacaaggcactttcacacccattatctaatttaatcctcataatgactatgtgaggcaaatgccacattgcccatttttcagataaagaaacaaaatcttagggaagataagttgagttgtccaagagcacactgaaagttgaatgttatctaatgcattcctctacctttcagaagatcagtagctggctgagaatctttgccaaatcttccttgctagccagaagtggaattggcagcttctagaatatgtacacctctggacaaaatgttcctcaatcttaagatacaaagaccctcattgtctgggtctattcccacacttactgagtacagatgaaggaaagtggtagcaatttaatcataactttcatttgctgaaaaacattatgagaaggcctcccttcctaagccacctctggtcttgctaagtcttgatcttgcttcctgccagcaccaaacattacattcaggggatttcctctggctcagtcttttccccttgaagttctctaatagatgttacttttgacaaaagatcgcctatgagttacaagcaccaggggatgctctacatcaagggatgcaccttcagtcaaactgtcaaaaagcccagaattcccaaaggcattaggtttcccaactgctttgtgctgatatcagaacagcagaaattaaatgtgaaatgtttctgatgacttatgttctacaatctatggacatacgggatttttttttcttgctttgaagctacctggatatttcctatttgaaataaaattgttcggtcattgttggt

SEQ ID NO: 164 - protein, 291 aa, Homo sapiens
MQPEGAEKGKSFKQRLVLKSSLAKETLSEFLGTFILIVLGCGCVAQAILSRGRFGGVITINVGFSMAVAMAIYVAGGVSGGHINPAVSLAMCLFGRMKWFKLPFYVGAQFLGAFVGAATVFGIYYDGLMSFAGGKLLIVGENATAHIFATYPAPYLSLANAFADQVVATMILLIIVFAIFDSRNLGAPRGLEPIAIGLLIIVIASSLQSGCAMNPARDLSPRLFTAGWGFEVFRAGNNFWWIPVVGPLVGAVIGGLIYVLVIEIHHPEPDSVFKAEQSEDKPEKYELSVIM

SEQ ID NO: 165 - DNA, 1692 bp, Homo sapiens
agtaccttgagaataaaggtaatgattaatctgtcaggcacaaaagggattgttttggggatttcgggttctaagtcgcagattcaaacaaatagcagcgaacagggaatgacagttccaccagaagacgattaagccacagcctctaattggaacggcatttgtacagtcagagactcttaccagacatctccaggaatctgtgagccattgtcaaaacgtccattttcatctggctgtgaaagtgaggaccacaacaggtaggtattggtagaaacaggagtcctcagagaagccccaagatgcagcctgagggagcagaaaagggaaaaagcttcaagcagagactggtcttgaagagcagcttagcgaaagaaaccctctctgagttcttgggcacgttcatcttgattgtccttggatgtggctgtgttgcccaagctattctcagtcgaggacgttttggaggggtcatcactatcaatgttggattttcaatggcagttgcaatggccatttatgtggctggcggtgtctctggtggtcacatcaacccagctgtgtctttagcaatgtgtctctttggacggatgaaatggttcaaattgccattttatgtgggagcccagttcttgggagcctttgtgggggctgcaaccgtctttggcatttactatgatggacttatgtcctttgctggtggaaaactgctgatcgtgggagaaaatgcaacagcacacatttttgcaacatacccagctccgtatctatctctggcgaacgcatttgcagatcaagtggtggccaccatgatactcctcataatcgtctttgccatctttgactccagaaacttgggagcccccagaggcctagagcccattgccatcggcctcctgattattgtcattgcttcctccctgggactgaacagtggctgtgccatgaacccagctcgagacctgagtcccagacttttcactgccttggcaggctgggggtttgaagtcttcagagctggaaacaacttctggtggattcctgtagtgggccctttggttggtgctgtcattggaggcctcatctatgttcttgtcattgaaatccaccatccagagcctgactcagtctttaaggcagaacaatctgaggacaaaccagagaaatatgaactcagtgtcatcatgtagtggcatgctcagctctggatttgcagtcagtttgggattctcttcagaaagatggcatctaagtgtctgtgttcttgtaagcctgaggtggaatccacccagttttgtctgctagccatatgggacatctaattggaaaagcatctgcataaaagtttggaaacaatgaccacttctctaccattgtcccccacccccaccccccagaataacgctgactgtcccctgaaacagccttctctcctgccctgtttatttcatcctcgatgggaattcttgctaggtaagcactaataactcggcatcttgacgatagtcccatttgggtgtttcagctgcactatctgtatgaaatggtgtcaccaaaaccttttcttcagtatcgacaaagattacattctgagtaccaaccaaaccctaaattgaaagacaaaattccagttcccgctatgctactggatttgtataaatactgatattctccaaacctagtggtgtaggg

SEQ ID NO: 166 - protein, 291 aa, Homo sapiens; identical to SEQ ID NO: 164

SEQ ID NO: 167 - DNA, 150085 bp, Mus musculus
  misc_feature (1)...(150085): n = A,T,C or G
tggcatgtatgcagtgtgtgcagtgtgtgcaggggtggggacagtgttcataacatcatgaccctggaacacatcaggagtatgaaggtcccatgatgacttccaaacttatcagtaggtcaagcccccagccatctaccagcagcgttgagagcccactttccctccaggaagactggggtacagtgatgttaggcaacaagctcaaggttacctgggcccagtaagatgctcccctggccatgaatcagagcaaaacactaggatgactgtcctttccacccggtgctcaagggacatttctcccatgatttgcggccacagcttggatgcagccactcgcctcctggcctcacggctggcagactccagtgcagtgggctcctttatcacagggaagcttcactcctcacaacagagcagactctaaatgcttcaccggccttctctggggcagatcttaccttgatacctttaaccagctgtccaaggttctcatcacctcaactgttctttcttccacttccagaaagcaaaagcaggaatccttaagcttacgttcctcaggaggcagacattcaactctgctaggctggggtaggatgttcaaaggcctcctgactcattcctgggagctaagacctgttcaccaactacacgacatcaaatccccaactttcttctgcaaagtccagccgacaagtaccttgagcaggcagagcacagaagctcactggggagggcagactgtcagatcattggtaaaacccaaaaaaaaaaaaaaaaacaaaaacccaaaggctgcaccgccaccctggaagcaggcaggaaatgctcatttgcatgctatgtgcatagttttgcatattgagataagatgggcttattaaaaaaaaaaaagattacagcatgctcctcttgcattaatgaaggaggagctgaaccgagagccagcctatctactgcctcccaaccagctggaataagttgctcagagatgctggagcctcagtttactgatctgcccagatgggctaatgctatctattcagaaggctcttttgagaattggaaatcttctggttcagtcttggtagttataaagatggagggattggagcagagtggagaggaacggtgggtgggattactctctcctcaggaggaaacatctaagattcattttaaaaaaatatccagggttggggggggggactgtgcttgggtgtcaagtgaatatgtaaataaattaatagaaaaaatatgcctgtgtgaccaggacctccaaatatgtcactgaacttgctttctgtttaccatctactgcctgctagtacacacacacacacacacacacacacacacacatatatatatatatatatagagagagagagcctggtttatagcctgctatgaagacagtttccctagcaagactcccttggagaaaactaaattttcatttgcaagtggttatcaattcaaaatagtttctaggttaggggtgattctgtcctgggaaccttgggacccctttacttcctccatcagagcaaccccatttcagtctgtcatatattggagtctccatcaaatttagttctaaaagaacttccctgtctcttaaaaagctgggtctttgatctctgtagacccccttttacagcttggctgttgctctatctgctcatgttgccaggggcaaatataacagctctaggaccccacctggtgccgacccatgcaggccctgtgcatgctgcctcagtctctgtcagttcatatgtgtgtggatcgtgctgatttaaatggccttgtttctgtggtgtcctccaccccctctgactcttatattcttaacctcactgaagtggaggtaaggtcttaagacactgctgaaagcagatctagaggaggtagtcacacagggtccaacctcacccctcaggacctgatatacagaactgccagggctgcctctaagtcgtagcaagcaagaggtgatgtattatcccagtgttttatccattcatccacacttgctaatgccctaccctctgaagggcctgaacatgcctgatgtacctactgtcccttgggttgagccccagcctctttcttgtcttctgtctaaatcactgctaatgaatcctgtctagggtcctgccctcagccatcccatggcagctggcttggatcttcagtatcttgttcaggatctcagtagcttgttgtactcttctgagtcctcctcccagaggcctcactttcagaaagtgtatctcttcacttctgcctccctaaatctcctcccttctcatttggtggtcaccccctcagcaagatagtgctgggctgccagaaagagccggagagaacttcccaacaagctagtgagaactgataggtagaagaagccccctcgttctctctgctcccatctccctccttagtaaggcctcccaaccagccattctaccgtttaccgtcctggagctacagaaaccttctcatggccttatttagcatgaagacattctctgctggtcagagacagtcatggttagcccccaagtcagtggcataggcatggtcttagagaagcggctgattcgtgtgtgcttctacagaatctctgaggcctggttgaccctgttgtgggaaggagtgagagtctacagaggcactgctgttctttgaaaggaatactgaggcgtggtcatctctagagtggtccaagtgtttcctatctgcccatattcaggacacgggggagatgggacctagaattcttacaagccatgattattacagggctcatatcctgacagtctcctcatcctcacgtcataccgtccgaggcatccagggccttctgtcagatagtctgctctagggaaaatgctgagctaaggccctgacctccccacccccacccccatttttaacttggccactttcatccctcctgtttcctgccacacatgctgcctgagatgttccgtttgcccaaatgggtgctacttctctcaggtagagggggtgggaagtgtgtttccagtgggaaagggaagccacagcccttttgactttacccctttgtgtggcctgaagaatcagagctcctggccctgtcacctgccttgacagcccatttcttttaggtgttgctcaactcctccgagtccccaaggtaacagagtagccccagtgtggcatgacctttccctgcatgccctggtcagacattccctttttggactagcatcactgaagaattcatggtagctcaatggaagaacatttgtctaatatgcctcactttcagaaagtgtatctcttcacttgtgtaagctcttgtttaatcccttgtgccaaacagcaacaagaacaaaatatatgtcatgggagctggggctaggaaacattcccttcttaggatggctcaagggagtgctaataagaatcccaagttcacttgaagtatgtgtgaagttggtgttctggctctgggacaacacaccagactgagggtgttccaacccttcaggggagtcctgtgcttcctccttcctgcctcttccctaccttacccctcttttgcctcctcctttctgcttcaccccatcttactttcatttagcctgtccgagggatagatgtgaggttggcaggtgggactgagaccgtagcagtgcaaagctccacctgaccttagtacgaaagcatgttcagttatgagctgagaatgtaccttcttggctttgacccgcgttcagaagagccagtacctagctggtcagtggtggtgcatccctttaatcccagcacttgagaggcagaggcaggcggatctctgagttcaaatgcagcttggtctacagatcaagttccaggacagccagggctacatagagaaggcctgccttgaaacataaaacaaaatgaaacaatcgaaaaaaagaagccagtataaaccccaagaagtagagaccttacaaatgcggcagggctggctccaaccttttacaacataccactcctacaagccatgctgccatcttaagcagcctcaattttccctccagaattaaaacagaagcctccagccccacccatttccaatgctcaacagataaaatactaccagcctctctcatatcatcaattaaatgaactaatgatggaattgggtcctgccctccctttaactggctttcaaaggtcagaggtcaattcactaagggactgaaaagcaaaggccagcagacatgtcccagcagacgaagcagacagttttaggaatttttcccagggcacctcctccacctattgctgggggttgcacttcctctttcctcttatttttttccctccacaggttctcatgcagtgctggctgacctgggactcactctgtaaaccaagctggcttcaaactcacagagatctgcctccggagcactggagttaaaagcatgccaccatcttgccccatactcagatgccatcctctggaaccaaggggaggatggttggtgtggggtatggttctgtcctggagaggctctttttaggatgggggcccctcactcctgttgcactgtgcagaggtggttcattcaggtgacacgtccctaacttgttggcttcatccacccatttgtccaggtcctctttgcctcattttctgcacttgcaaaatgagcacatcagaataaagcatttccaaaattactaactgggtgctagcaacctggtgaggacacagtcctgcccaggatgagccttcttacccttgatggggacagtacctcaccctcttctgactggcatggaagggcagttggtagaggcggggcaattcactgtggccactgggcaaaggcactgatgggacattaggcagtgataaaacactgcctctctcagagcctgacttagcctaccatggataccgctcacttgcacctagaggcagagaaccacatcttgcagagagttagagctgctgtcagcctcggccggggggcctgaggagacttttatttattcgaaaaccgtccagacacctaatgctctgctgaggggacaatttctctcttttatttgtcctcattttctcttgccagagtgggatgagggtcagaggaaagtgagcgagaccagcgtctgagcctttctgccgtagcagagagactcagcaatggtgccaaggaccccttcccacactgggcagacattgtgctcaatatcctcctaaggacacaaactcaaaaggtcccagtagcctttaagggagggggcctagaggatagacccaaacctgggatcatgctctctctctctctctctctctctctctctctctctctctctctctctctctctctcctctttctcggtggtggtggctctctctctcctctttctcggtggtggtggtggtggtggtggtgagcttgagctcacagccttgctgttaactggcaaaataacattgtaacactgagagaaacattgcatctctgagagaaacattgtatcactgagagaaacattgcatcactgagccacacccacatccagactgggccttggatctttgtgtttactaaacccttggatgaacccacctttccctaagcctcagtttccacaggtgtaacatgaagcattcttcagtgagatcttggtccagatctcactgaagaacgtctgctgtaggactacacatgtaaccaagacaagagctcccaggctatataaccaagtctgtctatatagaacccgagctggggtgaacccagttacaatcatccctaaacttgcacaatgattgacatatttttgctttccttcttatggatgaggctgcccagggtcctggagccctgggtatgatggtagactgcctgccttgatatcttatcatattcgcctaatgctgtctatgagaccacactgtctatcttcctgtctctgctaggggctcagtcttggtgacttacactgctttccttggagaaagggtccagctcgctcctccccaggctctatgcagtccgtctgccaggcatgttcttttgccctcctttctgctgactgcacatagtctttcctgcccttttgggcctcattaggggtcgtcccctttagaacacctctcctggctgcccaggcctcacagtgctgaataaccatacgcatgtttgatcatgtgcatttttaaaactcatcatgcatgtttgaggtgtttgtcatgtctttcctgtgtgccgtggtccccctacaaagtagggagtttccaggaacaagcctaggctctacctaattagccagcattctccattgtattcaaatgtggggcccccttctggttacacgtggaggttacagtttatctgccccatgcttagactagggcattttggggagcatatccccgctcacctggcaaggctgagccataaactctcctcacttcccaggaagcatctacttgccccagtgaagagtctgcccttcctaggggatgtgtgaaacccgtgtcttccttcattaagcacttgctaaatgctgagtcttgccctcagggtattacatgctttgggttttgagactcctactgccagataaggctcaggtttggcactaggtggatgaagacacaggctcacagagacgaagtagacttgcctacataacccgtaatgcctgttggcaacattgatctgtctcattctcaggtcagatactcttcccgagcatagctctcaggctccttaacctgccacctgttttatttgttatcccaaaatgtctttgctgtctgaaacggccatactctatcctatataggacctgagtaaggactataggtgtgtttctgaccccaaggcagaagccactgtaggtatgtgtgactgtagagggagcaggagagatagagaggcccatgcaattgtggagaggcttttttaggcccttcttggtatgagcatttgatgggctcatgcgcatcctgggtccaaatggtagagaaaaaggagcaggccccagggagaagaaactgcaggagtaaggccacagggcaggggtttccattgaacaggttgctgtccagccctcaggcttgagtagggtggggatcttgctgccctggcatgataaacgttcctgataggctccctcttcccttgggtagtatggctgagcccaggaccttcttagcacatagtaggttctccataaagctctgtcagcctctctggatactgagctgatgtcctgtaggcttacacatggagatggctcctaccaggtcccctgcaaggatgggttcctttctgctgactgcaatgttacatgcccctgccctgccaccatcactcaggacagacaccttggccaggtgggtggtattagccgtttcctgctgaacctatctgcctgctgtgggcatcttattctctggtaggccacaatttcccctcccgagaccttaacctgcagctggagccagctgccaagaggctgaggatactgtgagcctccaaagttggaatgtgtaaactcttactacccatttactcttaattacctcccctccttatttgtcttcctttaacggcctgtcaaccaaaatctcccgcctttccctctgcgctagcggcctcaattaggtgcacatctgcggaggctgggatggagacgctcaacctccaacgctcactgccgaactgactggccccaggtgcttgatggcctgggtgctctccaaggatagcactggcatctttgtatcaaaggtcagccagcctgtctctgacatgtgtcaggacattgcagtctgccttgggaaagtacccacccacccagaaggagctgcggacatctcaggccagtcctgcctgcacatgagggatgcagatgttagagacaggtgtcagcaggacaggagaggactgctcagcccaaacttactgactctccagtgcaggacactctctttatctgtcctggtgatgaactgttctgtccggatctggggacaaggagcggtgggtattcgacatagtcacacatctggctcagtgacacccctgcttgcctccctgtagagctggcctgatgtggcctcccattgttctctaggcccttccagaccaccaagtcccagaaactatttggagtgtagaactgagggccctttttgatatcgctgatagacccttatagtgttcagtataatatactgaatctggcccgggaaacttcactcagatctagagaagaggaagatgtgctcttgtcaagcctttatttttaggagtggggaaagatgggaagcccacagcagagttgaaagtcaggaaaggttgtctgagtctatatcacttctgtaccccttggcccagaggctactgttctctcctctctctggaaagtcggttgtgagtagatgttgggtgacctacccaggcatgggatgagagtccttggacatctctgaactgagccaccaaccagttaataagcccttagtgtcttgtttggcagagtctgtgggcagccaaagggggtcctgtggcagggtggcagggagcattctcaccactgtgggtcagcgttgggggctggcaaagtggggctcaagggccaacctgagcaggtccttggaatgctcttcgaaactgtgagtgcttctgctaccagacattcaacccctttctcactgcatcctggaaatggcactgcagccttacaggggtattcctatgaaaagggaaggctctgagaaggtggcccacacgctgaatgttacacacagctcattgttgtaactacagcaggaagatgccaggtcccaccaggacaaaagtgagtggtttatgctagactgagcttcctgcctctagacgagtctgacccgaagctgtgcaagtccagggagcggaggcttgggctccgtggcccgtgttgtctggacagtaaagtggagcaaagcaagagctgaggtatcccgcttccttcagtccccacatctgtgccgctggactctcttccaaggaactaggagaaccaagatccgtttttctgccaagggctgccccccccacgcccccaaccccctcaccccgatccccacagaaagaaatcttgaggtagctggagcttcttctgtgggtgtgacaggactgccattctcctctgtagtctgcagaagcctgccattccaccatttaaacctgtgactccaggccttaagcctgttgaaggtcgagtcccagaagggtcatatgtgcaactgcctagggagagttcccactcgcagggccaagaggagtcccccggtctgaggtgtgggggcggggacgtgcactgggcgctgggaccacggctggggctcaggactcgcgagcttggattcggatcggtttgcgcgagccagtagggcaggctccggggtgaacggggacgaggggcgcgcgggcacaggcgggcgcgtgaccgcggcgggggcgcgcggaggcgggccggccaaggagagggagggaggcaatgagggagggagcgacaggggannnnnnnnnnnnnnnnnnnnnnnnnnnnnnnnnnnnnnnnnnnnnnnnnnnnnnnnnnnnnnnnnnnnnnnnnnnnnnnnnnnnnnnnnnnnnnnnnnnnnnnnnnnnnnnnnnnnnnnnnnnnnnnnnnnnnnnnnnnnnnnnnnnnnnnnnnnnnnnnnnnnnnnnnnnnnnnnnnnnnnnnnnnnnnnnnnnnnnnnnnnnnnnnnnnnnnnnnnnnnnnnnnnnnnnnnnnnnnnnnnnnnnnnnnnnnnnnnnnnnnnnnnnnnnnnnnnnnnnnnnnnnnnnnnnnnnnnnnnnnnnnnnnnnnnnnnnnnnnnnnnnnnnnnnnnnnnnnnnnnnnnnnnnnnnnnnnnnnnnnnnnnnnnnnnnnnnnnnnnnnnnnnnnnnnnnnnncccccacctccatcccgccgccgccgtcccccctccctccccgcggcgccgcatcttgaatggaaacatggcggtgccggctcggacctgcggcgcttcttggcccggcccggtgcggaccgctcgcccctggcccggtcgcggcccccggccctgccctgacccccggggcccagcgtccgggcccgcacgcccgctcttgctcttgctgccgcctctgttgcttttaccgctgctcaccgcccccggcgcctctgcctacagcttcccccagcagcacacgtaagtggcctcagccggccgcgggaccccgcagagccccgcgctcccttgcgcccctcagcccgcgtctgcccctccactctccactccgggtgtcggggcgggggctctggttcccatggcatgctgcaagtgagggtgtcggctacaaacccccgtgggctggcagccagggtcccggagcttctggctgcgtcgcgaaacttccttgcggtgccctgcttcccatagaccgcccccaccccaccccctgcaacgggacagagcaaaacatcttcaagcttagggatggggtgggggtcgagtctgccagcttatactcctgccactgtccggtgatagaggagcctgaggttggtcgagagaatggccaacgacccctgcccggtagacttggagccacgcatctgcccagtgttttattcctggtgggaacctggcgctttagagtcagacgtggggttacatccacacctgtcttcttgggccttttccttgggggggggggagcgatactggatgcagagggtgccagcgccttcttgcttcggtcaatgtcacctgttcttgatcgcccacctgaggggacgtccctggatagctcaataaggaggtgaaggtgctggggttgggtcagaaggtgaatgacagggaggacccctgcctgctcctgatgctgacactgtcgctcctgctaccaactgggtaatagcattccaggttctgccagctcttgctagtggttattatggtcagtctgagcctcttcaccttccccaagatctggtagagtcgggcagatgtgtctggataaggagtgggtattctgcatgtggcctttaggacaacatctgtttcttgacaccgtgccttagccatatgtcagtgtccagacaccctttggggcatggcaaccaccgtgcttctgtttcctgtcctcagctttaaggagccacctgtccccagactccttcacgaatgtcctggcctaggtttgggcatgagagggaagggtctggccccagaaaagagcctgactagtctgcgtcacaagagcagttctgcccttgggtaggagaccccggctctgccacagagcctgtctacttcagctggtaggttctctcagatgaggagaaaacaaactcagatgaagcagggctcggactcagtctccctgtcctctcccttatcatcactctcctcacacagcccggccgtgtccaggagggtgatcagttggcaaattacaggtgccgcacggacgtgtcctctgtcagctgtctggatttttcatgagtggatggggggtggtgcggggaagttcaagggttggtgggtcgtggtattgtctttcatttgctgcgatgagactggatcgaaactatagtgtttagaaagagcaaaagcatgttttttattgttctttttttttctcaaagccaagccattttttttctttcctagccatttcccagtccctccagtgaaggtttaagtagttatctctttctctcccctttcctgcgcgtacactgcctcacacagccgctgggtctcccttaggacaatgtcagaccccgttcacagggtacacctgtccctctgctcttagccagaagatgttaggtgggtgtgactacagccgcacatttccagctggacactcttcccttgttgatgtacttggagttaatttgagggtttgggacatgccttgcaaaccataattagggggatgagagaggggctgaggctcttgggtctagctgacaaatgtgtgacatccaggaggatttgccatgacaggcagcgcccttcagctgccctggtcccatgaatgcagatctctattgatccttggagggaggaaggggactcttgtagacccctcccaatgactgcgctggttctgggttagggcttttgttaaactggcataaaaggctggggctgctgccagggccacagggctctctctatgggctgctcagggctgagtggcaccccttagccttttcttggaccagagtagccaggctaggaggacactgatacaggtggattttcaagatggaaagtaggactgtcagcctcatggtcccggggtagcaagccttccatggggagggctctcagtgattaagtatactctcctgagtgtggtgccgtgggaagggagctcagcttctcaaactgcttggttttaatcaaatgcgggtttaggatctggtggccgttatccctgtgatcgctctggcagcgtggctgtctgccatcgggtgaaatgaaccaagccattagattgcaaagggcagaggagttagcactggagggaggacggggactttggttttaggaagaggggcctctctcaccctacctggatccgcatgggggtttcagatacatgtgtcatgcatgggtgtgtatagtctcctgtctcggaggatggagccctagcgcagcgcacactcccttttacctgcttcgctcttttcccatttacgcccaccccagtggtcagaccagccagtgctactggctgagaggcagttcttgctgctaatggccctgatgtattctgtctctctttgttgccccacactccagctatggggttccccccccttctcgtcttacctcctcttaccactctgtacctaacctggcctgcttgcctttttgtcctttctgttgggttcctgtacccagtcctgtgctatccctgggttctctgtcccctgcttagtagagtaatggttaagtgctgattagagtacccgcctggctgcacctcttcacctagctcttctctagtgaagtggtaggtttggtgcctcccttcctctggcatggttggggagcagtgagggcccccccccagaggcttgcacccctaacaaatgaatgtctgtcagagtacataagtgcttctcttctgggtgggcaaatgaggagcagcgctgtgacagggcatgcgtcagtctagctacggttaatggtgggtgacgcgtgtctgtctgggcctctgaataagtctccatctctctgtggctctccctgttggtgggaggcaatattacatgtgtggatcccccccccccatccttctaacaacctgccgcagctttctcaggagggaggggtgaggcttccaggtctgctgtcgatagaatgcaccactgccaggtgcctgcaccccctcctggggttgagaatttgggggagacctttggtctttctgccctcttatcaggctactcctcctggctagaaatgtcaggctaatctcctgagaagggaagaggcccactttaaagtgggtatcttcatagtctgaggaatcttcttccagattcctcaccacagacgtctctggggagacactgactccaaagtaaagcgggcaccacaagtagatcaagtgagcccttcagcagtcagcgtctccttctccactccacttgaatggaggtggatgctaccagctcccagtgcctcacaggcatccagtggttcctgtcagcttcttggaggacacagtttggaggcgggctgggtgtcaaggataaataagccttgcatgctccattttggtcatcttttgagatgaccttgccttgattttccataccgaaataatacaatcttaagaggctagtggggagagccagtgggggaagggcggcctccagtgggcagctacaactcaactttcttgggcagcaaggcagtgactgtttatctctgcatcaagttcacaagccaaggctgcagaaccttagctgtcatttacagtgccccccttaactattttttaattagatttatttatttatttatttatttatttatttattgagacaaggtctcactctatagaccagtacatatgtagacctttgagtactgggattaaagtgtgtgccaccatgcctgagtctgactttcttcctgtctctattcaccaccaccctccatgtccaactgtccttggtgaccggtgggggaggatgctatgaggctcagggtggattcccctcactgagcccaagatgggctgcttgcctgtattaccagcttgtcctcagaatccccagcctggggtactgagacacacagagagaaggaccacccaaagcccacatttcctaaaaggactgaaggggcgatgttctgtcaaccccaaggggatgttgggatgggaacccaggggaggtaaggagaggagctaaagacccaagtgttttaggaggaaaatgaaaaggnnnnnnnnnnnnnnnnnnnnnnnnnnnnnnnnnnnnnnnnnnnnnnnnnnntccccgtccccctccactttctctcctcccctaccacagcacgcctctgtgaccttgcttgctttgtccttctttctcctctgggtctcctacaagcctgaggggccatctttggccaaggctaccctgccagctctactgtacatgccaccctccttgtgtgcatgctggccatcatgcaatggccctggggcccagaactgtctttgtcctagtgctttcactgtggcaaagcctgccgatcagggtgctgagccggtgtgtgtgtgtgtgtgtgtgtgtgtgtgtgtgtgtgtgtgtgtactccatttccagattctattatgattctagaaggaaaggtcagggggctggtagggcctggttttcaatgcatatatgaagttggagcctctcagttatttttgccaggcccacaagacttcagaagactctggccttttaggtgcttgagagtgtgctgtctgcacacaacaggtggggctggggtggaaggccttaggttcttaaggaagggcccattgatatttcgaggttacctgcagctttaggggtcaaggcaggcaggccctgcacagtagcattgtgtatggtatgagactggtctctttctgggaaaggtcctttctgtcttgcagccctcaacccattccacaatggccagggaacccttgatctgtgtcttccggtgattgggtcctagccccgggaggggcgctggggcctaaggttcccaaggtcctcaaggtaatagtgatggctttcccatcacagatgcagccttgcaacttgctgaggagagcctcctcatgacaggtttgtttttcctggggcccactatctaaacacgaagctacagaatcaatattcggatccccggagggaagcgtatgtgtgatttgtacttctcccttttttttcttaaaaaaaatttttttttgttttgccttccctttttcactcattctttgcaacctcaagaaccgcattaatgtcactaaggacctcaggggtggggagggtgtcactaccgatgaccactgagactgaaacgcccacaagtgcttctggagtccctgtagaaggtttctggggacttccttaaggactcaggagttctgtcccttggatgcacacagtttgagcctgaccttatgcagacaagtcctgtcctgcttctatgagactcatcagttcatatggttgtccccatccctcaacctgtcccttatcctggtcctgttgttccctatggccccacagacacccttagctaactggtctggtctgattttctttgtccacagctactgttcgtgctagaggctgagcctggtgccaatggggcttactaggaaaccttgcttagctgtgtgtgtgggggggggggggactctttactttggttgggttgcagctgtcaagagcaaacccagcaaactcagcccagcccttctcagagagccagcttccttggtgaccttgggcagaggtccttccctcctgggtctcagtttcctttctcctcagatctctcgactctgacattccagcactctaagaagacaagtgtgggaatctgtcttctgtctcctttctgcactccattctagcagggatgaagtgtgacccaccccaatctggccctgctctttttgtgtgcatgaggttgtctgggcctggtaccttgggtgccttgaagtctctttgcttctgactgacccactttgggttagattagcctaattgtttagcagagaaagaggaggagaggaaatcttttctgttggtcattaaccatctctcccaaccttaaaaatgatgctcatcagacaaagggaacaagaaaggagacctccccaccccaaacagtctcccttccatctccttagatcctggaccccttgtttctactgggttactccttcccggatagattctttctgagcaatgccctctcggtatgtccctgagagtgccccctctaggagttcatgaccttgggtacttgctaggcttctctgggtttttgaggtctctgctacttcccttgagtagggatggcatggatcatgagggatagacctacttccaggccctggatctaggagggtacacaaatacggctgtgcctgccctgagtgcacctgtctctttacctatagcatccactattcagtcagatcctataagggaacagcctggggccagttatggtttctggggttttcctgttgtacagggagggcccttactttggcctgagtgtatacgtaagctttaggtaggattgcttatatctgtatgctcatgaatgcctttgcaaatgtgttggctgtccatcatacttgtttacacgtctacttgtgtgcctgtgagtaggtgtgtgcttaggtgtatttgtgctagcaatggtgtttgtatgcacatgggtaggtgtgcatatgcatacgtgtttgtatatgtacacaggcacaggtgtatgcacacaggcacatatgacctcatgcctctgtgtgtgtgtgtgtgtgtgtgtgtgatgcaggcacatggcagtttatctctgcagccagaatgtgcttgccgtgcccacctcctgtacctgcctttgatgtgaatgccagaacttggtgggcgaacgctggcagagagaaacaaagccccctgcttgtgaagacccgtgttttgcaaacttttatgtcaggaacagcctgagttaaggctgagctggaaagtttgatcatctaccaactggcaggatgacagtctgcaaagaaaacacacagaggctacgtccttgtaattcaaatttctgcgagctgaatggcattcagattcactggaggactcggaactcagaggcgctctatgcggcctttgagaagtgaagtgtctttgtaagtagcccttgcatggagaaagtctgtaggggtcacgtggagaagggcagggtcctggcactttggaagacctttggctgtgtgaccttaggctggtgggtttccatctctgcacacttctcatttgcaccctgaaaggcaaggggcatctgtagcaggtttcaggtccacgtccagtgcaagatgtccaggaggtcagcagtcgccattcagaatctagacttgaacctttgtgttctattcagagtgtctctagtgagattcaaggatgcattttttttatgtgctgaatctttgtgaaattggctgtcctggtaccctacattaaggtactggcctttggggctatccagattgtggcccgggtggtcctgatgtctgaaagaactgtaagtttaattttattagtgttcttaaagtcagaatgttgggaggtgagctggcccaagattctatacaatttgagaagtggttaatgtaaggaaaggcaaaggtgcctacaatggcccaggagccttgtggggcaggggtttctctgaaggggcaaggaacctgggtgaaaccggctgagcactgtgggccgtgcatgcatcctggacttaggagggtcacagctaccaaagctgcaggagagccagatgcccccatctgagggaaactgaggcccaaggagagggagcgagtctttagacacacatttatgttgtgagctcaggctcagcacatagagcttgaaggatgatcccccatgtggccatctgcacactgggacatgtggtcatttgtcttaaatagccatatctatggcctggggtgagagagcagcgggaaccaaccagctctccttgggcgcgcttcagtagagggcctttgtggtgtgatcctccaattcctaatttgatttgaggggagcaggggaggcaagcacttggagccaatgtccctgtgctgtttcagggtcacctaagacttctggatcaccttgggaaggacgtctttgccacaaggcaggagggtgggcactgagggacaggcgtgtgctgccgacaggtagaagcccctgctctgcctcgagtttccagcctgacgtggcatttcagccttgataacttccttccgcagctgcgttctcccgctggcgctgcctgaaatgctgcatttgaagccttaaaggtcaggctcggtgctgccatcagctccaacaaacaaacaaccaggcaccccactctggccctgcccccaatttcagttataagaaacgtgaaggagctgtcagagccttcagaaagatcctttccctgtcttctctgtgagcaggggctgcgtgagctccccttctttcctgggacccctcctccccatgcttcagtgtccccttatgaggatcagtggtgacctacactccagaagtcggctgctcagtctggaattcaaatccttgccaaggctgcctctagccctggaatccctgttctccagctaggtagagccacttgcgggtcctagtaggttctccagcctccctgactcctggccttcacccggacatctctacttacggggtttctgtaaccatggcagttggtcttctggatgtcagtgctggggtgaggaccattcctgaacgatgcccttctgctccccacaccttgtgtgtctctcctataatcctacaccagtagtgtgccaatagcaggctactttatgggacccgtggaagggaggggattgtactgactgtcactaccttggacactgagtccgaggaacgtacgtatttggcgatggagatgaggaaacaacactacatctgtgttcaccttggcaacccctagatgaggttttctcttgtggctaggccttgcctcctctgacaaggttgctaaatatgggctgtcaatgagaaccgagtcctccccttgggctctgcctggctgggcttactttggctatggctggctatctttggtcaacttccctaatggcaacaagatggctgccacagctccaggcatcatgtcagacccagattttatgtatagaacaggagatatttcctctgagtttctcttaagaggagtggaaaccttgcctagaagcccccagcctactttcccttacacctcattggctagcactgggtcacatgcccactctaaaccaatcactggcagcggagaaggcactctgtgattggttcaggctaatcaggatttacccttgagctgaggatggggtcaccttggggctggaggaggagattctgcagacagacttgggttctgttagcaaggaggctggcgtgatggaagataggaagaccgtggctgctacaggcttaggcaagaggtgcggggaggtgctaagaaagcaggagaggtagagaaaagacgagatgaaaggagatgtagtcaagaaagcaagaaagtggttattttatccacaacatcggtttctgagagccgggccctggtggtgcgtttcatatatactgtccaatgaggccagttcacatacaccgtgtttcacacacaagagaatggggttctcggtgaggctaagtgatgctgttgtctcacagatagcaagtgatgggttggggttccctttctgcactcaggacccaagcactcagatactccaggcagctgctagctgcaggacctttggggtgtcaccataacacccatgttgtgtcatcactcgtgggcatctgtgagggctgaccctctctgatgaaagcagccctagagatggaggcatctcagagattgaaggacccaataggacaaccctgctctcacctgcggtatagccatgggtcagtggcatttactggaccagcttgtcctctttaactcctgtgtagatagagaaacagagccctactaagagacgatgcttgaaccttccagcagttgaggcatagctagaccccaacccatcaagatactatgttttaccagttgacgttggccagtcgtggcctggaggtcattcagaccatttgtgtttctctgtcaaggtaaggacaggccattctgggcagcaggaagctgctgggtattatcacagcagagaggcatatgctgctgctgtagagccaagcagctggcctgcctaaatgagctgccataagtatgccatggccatgaccacgggggagacccaggcttcactgggtactgtctatgagacttcttcctcctttaagagggagggcagctgcaggatgggctataactgtgtctatagtgggactgtatttgtgcctgggcactgggaaaagcctggggtatcatggattggctctccggatgaataatacactctgacaagccctgttcccgtgagctgatgcccgctttcccgtttctctctaggctcttcattgcactagcccttgtgttcttcctggctcccgggtttgggtgcnnnnnnnnnnnnnnnnnnnncccccccgccccccccccccgtcacatgaggatatggttctccgaagctgcttggggtccagagagggaaggacctgacctctgctgggcacagccgcgagtcctgttcactacaggcctcctgtgatccacacctatttctgacacctgctggaagttggtggcactgtgtacatgtggagggaaggggaagagctgtcaaggctcacttctaattacccacctccatctctacctttctctagtccctctgctccaggttgtacccagcatcaggcaggcagggaggcatgcaggatgtgaggcagcaacccgattccttaaactggaccctgctcagacaggcccagcaacccccaggacttgtgtaggagcatctcaggagtcccctctaccccttttctcctggaccactttagcctcagccttgcccagctgactgtggcagtctatggaagcctcctggctccctcctcccagcctcaggggtctcagcatttctaggcccttccaaagcaataatcctgcagcaggtgaagatactcttcatctgcatgcctgtcatctgtatcctgccctgtaagttgatgttcagggtgcctacagtccaggagtctgcttctggaagacacaggtctggggggtaacacaggagagagtctctgtctactagggtaccagataccgccttccgcctactatgaagatgggcagaggtgagaaggactttagaggggccaaccagcccgaagtaagcccacctgtggtccagctaatgtctgcttgtttcttagtgcctggcaaggaatcactgtctgaagcctcccacatgtccctgtgagggccatgacagtccagagtacttcagaatccccttcttcccgtgtgtgaccatcaaggctgcgtgcccagggccactgccttcagctcctgcatcctgactctcaagtgctcaataaatgttcacaaagcaagttgctcatgggtgctactgcatgggtggtcccaggggcaaactcgtcatgtctgtgaaaactggagcaagtttatgcagggtttgggatgggccctcctgtaggcctggtttggccgctggtagtacagtttgtgtcctgagcgccccacccccccccccatctctcagtgatgttggtgcagtggctgctcagagggtgaaaaggaactgcagcatttaatgtgggggtagggcattagcacgttccccttttgtttgtttagagtcaaggtagcccaggctggctgcaggcttcagactcaccatttagctaagaatgaccttgaacttcaggccctcctgctcccacctccaagtgctgggattacaggcatgcactaggacaccaggctgctgtggtgctggggaccgaatacagggcctgatgcatgctaggcaaatgccctgccaactgagtttccttcccaaaccagaaccagaatttttctagagccctgcaggtgagccaaggtaaagaactgtgtcctgaggagaaatcggaaagtaaatgccctgctgcttggcaagggtgaggaggtggtggtgagctggctccaaggagcttccctgaccacgggaagaggtcatgctgtccccaaatctctctgcatttcctggggggcacggatcctctgcagtgatgcttgcccaaaccccttctgtcttgatgaacacatggactgcctgtctttctagattcacctcctaactaccttccccacttaagcccttcactgtgtgttgagctaactgggtccctgctctctggagctcacagtctgtggggaagatggacagcgtaaacgtagctgaacaagggatacccctgaaaggccagtgcatcatgggatacccagggaatgtggagacatcatactctaggccacctattgtccctggccattccagtggccctagaccttcgtcagctgaggttgtggaggctctgggaaattacacggaccctccttcccttgaagatttcttgtggggcaggcagaaagcaagagtagaatctgaggtatacctcgtgcgtgactccagcccgaggtgctgaagcccctaagaggctggtccatctctcttcccttgctcttagacactgctgccccttttgggcagttcctagaagccagaccatgtgactggggccagcgagcctgctgccccacagtcccggtttctgagcacagagcttctgggaagtgggtggcagggaacaatcccagaggccattaaatcgagtgatttacatggctcctgagctagtgccgggagaaatatatttcacaggtgatttccagactggtggcgtacggacggggccattactctacactgaagaagggtggagtcttcatgtacccatctggagggacctgtagctttgatttttgttttctttggtgtatatacctactacgtgctagaaaatctgaagcgtgggcaaggactggggcagaaaggagctatggaaccataatgtcagcctcataagttatggagttccaattattcagtgttttatatcatctttaagagggtattagattttttttttttttttttggtccagtcatttaaccctgttctcaacagctgaggttttaatgacatgtagctcttctgtgcctggccaccatcctggaagtgccattggaagtggagcctctgggtagcccatgaagccccttcttgatatacctctagatccctagaactctacagaggggattcacattgagtaccagaaagtaaagggaaaaaataccagaaaatgccttctgtcggtaagaggagcagcagggtagagtgtagagaataatagtactctaggcttggaatgtagctcagttggtagagcgcttgtctagcatgcacaaggtcttgagttcgagtcccagcaccatgcaacctgggcatagaggcacagacttgcaactccagccctgcggatgtagagacaggagcctctgaatttcaaggtcatcctccagtatgcacaaaatttgaatccagactctgccacctggatggagcctcagtacctacagcccccacctcaggaatcatgtgactagttacagagtataagctgcaatgttgaaatgcatgggccagcggggtcaacagtggggaccatttgtaatgtatttgtattctgtggggcgactgaaagaagagatggagtccactcctgagacatggtgtccttgactgccagcctgttcattcctcctgactcagagggcctagctttgtggtatacagtggactgaatgttgctggagccctgtctagcacctgtctacgttgggtaccaggaattgataggttctgaatttactaccctctgcttatgtccattgtcctaagactccaacccttgtacttgaaggttgggcttcttaggcttccgtgtgggagcaggctgctttggtgccatgaatggcgggtgggtactgatggcgcatcactgggcagagctcactcgcagctccgcaaggccatgccctgtgtgcaccgccttcccaacctgccctgggctaaggtcagactcctaagtaaccatcacgccgccgccccccgggggggctttcagggcctcttcccaccccatcatggtcagaagtcttcctgcttggattccaagctcccaagggcaggcctgcattgctaaccagagtccctccctttcgcccatagcaggtgctggctaaccatcccgaagtgtggattaatggtgaatgaagcgtgaaactgcgagttaggactctgcagaggggtggagatactggcgaagtattcggccagtttcgagttctgccggttcacctgcttgcctgtccttgagtcaaccctgagggacagcatgagttcgccaagcaaagtgtttcctctctggtcactcctctagggatgccagaggaggagggacctgtgtgaagccccttcctccttgcgggtgtgcatcatcgatgcgggtctcagagggaggctcacacggagctcccaagtcgctaactagccagtggtacacagcaaggcaggagtgggcttgtgctgctggtggcttggctcacttagagaagccagcctaaaaggaagcaaacccagaggaagtgggtcttctgcatcgggctccttctgtggatttggaggtgctgtagagcaagctctaccctgcagagacaacactcactccataaccccatacatccgctgggatatgaggaacggcttcttcattatgctaagctttggcttagcctgaggagacaaaagtctctgctgtagagatgggagaggtaatcaaggaaggacagcctttagctgctcctcttccttaattttggctattgaaaaccaccttgaaggtagaaagaggtctgtagtctcagggcaagaccaggactctgaggcaagactttaccaggttcaaatccggctgtaccaactagctgtacattcttgggtaagatggccccacctctccaggcctcagaatctatgtctgtgaagtgggcatgagttggcgtgcacctggcgtttatcttgatagtgatcacagagaatacctagcacgcagtgggtgctttacacccccgtctcctgggtgtctgggtgtttgctgagggtgaagcctctctcccactgcagaggggaaggggtcagacctgataccagtttgggaagacatctgttcccagatgtttccacaagacttctttgctaaactctaaactatgctctacaagaaggatggttatggacccacagactgcagtctctatgttaaaatatgtttaggactgtggatttgtaggtccttggtggtggtggtggtggtggtggtggtggtggtggtggtgctggtggtggtgctggtggtgtgtgtgtgtgtgtgtgtgtgtgtgtgtgtgtgtgtgtgtgtgtcaagaaaatccaggagggctttctggcagaggtgactgggccggattagaggaggcacaaagctagaaaacagagatgttcttgacaggctggcctctgagacctcagcctgggcttccctctgtacttgaaggccttcagggggcctaggacctgaggagaagtgaaggatctggatgggggtctctgtcctcctcaaggcgtgaaaccacactgaggacaaacagaggacagctatttgtagctcagtgaggaattgactcatactgggggaggggaagaacacacaggaggggagatggggacgggtgaatcacaggctctgaccagagtggctggtggaatgtgagggaggtctgtcctgacacccctagggaggcttgagcccctgggtagggcagggatgggacggtgtcacacatgcgtcgcccctggctcatccggtgacctctacaggtgtctcagaccggttctgtaccttctgagaccagctaggctaccccatcacggcacctggctaggcacacagggcagtggccatatggctacctcctaggagccaatttgagggacctcagcttaccagtttgtgaaatgggtgtgagtagggcctggcagtagggaacacacccacagaaggggtttcagtgcttgttgcaggtagctgcaggcctgggaagtctgtgacagaaagtcgacccccaggaaccatggctggagtcctttgctctgtactgaggcctcagttactccctgggtggttcttgctcatggtcgagtcccagcttgggactgacaacttcacagataatgacacctgtgctggcagtcatgagccacagctaccagggaagtggctggcttttcccaggacctcaggaaaggaccctacccttatgcaacgggctataagtcacacacagatcaggacccctcagcacagtgcaggagaactaaagcatgtacagctctaaacaaggcgctggggctccacatagaatttaactggagcataaaagatccccactgccggggttcttgaaaaccactcatgtggcccaaacttatcagtctgcagatgggaaactgaggcacagacaggagagtatgtatacttgcacaaagccagtacatttgacttagggcaccagaacccaagtggacatgagagcaccttggaccattgggtcggtgaaggcacggaatggccttcactaggggtggggtcacagggtggaggaccgtctctgtctggactacttctctgcacttttctttttgcttcctggaagaagtgtctgtgccagcgcaccacccttctgagagagccatgaattatgcagggaagccacaggcctgggcaggcccatcataaatgagccttaataattcatacagagaggagccaggggaagggagggcctcctgggctagttccgaggcagcttcatctgtgagtgcgtagagctggcctctcacaggctggagcaggtcagctgggaggtcagctggtctcaggggaagtgtatttgctcagtcaaggacctgtttctccaggccagagatctggaacagctaccctcagggctcacagcccaaggcagaagcatctgcagaggagaaaatggctagtgaaagcactcaccagccaggaggaatggagaccagttgctgctaggggagagattgcattttaagatggaattaagggggctttactgagctagcagggtgtaggtagagaggtctggtggcccggagaggactgtgtgctattgaggagactgttctgggctgagggagccgtgtgttttaagacatgtactgtgagctcaaggctgtgtccagccttgagggatatatgtggtggctgctggtgagctttggcttctcctccagagccaggaaccaagcttgatgcagacaggaggaacaccattcctaaaggataccctggctgtgtgtgatgaagaaactggggggatgagacgccaaggcaaaagctggcaaccagtgagctagctgctgccagtccaagggagacgatggtccccaggccagattggaggtgggggctgggggtggaggcagaaaggtggttggtggggatgggaaggggacattgtgaagggagagctggtagggtttgcacaacaggtttgatgtgggtatgagagaaaataggttcccagtcacacccaaaaatttggcctaaatggagggggtgaccatcagcagaggtgagaagctgaggggtggggagtggccccagaggcaaggtcagggtctcagcttcatacatactcagagacttgctagatgcccaagtagccatatcacaccagcagctggacactgaagattggtgtcttgttcccctctgaggattgaggacaggggtttggctgctgtggaagttaattaaaacaatcaacagagtctctgggagacccctgacagaaagaactgcatcacacttcttgatacatgaatcctcaaatggtctggagggccttggggtacccctgcttgattaggaaaactgaaatttgcatgtggttcatagataatggcctgcgttatggaaaagattggaagaaagatggcccctggttctctacccacagggctatcaccttggcctgtcctctgtcagagccagggcccctaaccagtgcttcctcactctcccgcacccctgttttcttccctgctgcaaaccttccttctcctctgggtcatctgccttctccagcccctctcccacaagtgtcacagctactctgtagaattgctctggaagctagagcaatccattttagggggtctcgcagtgttactagaaaacctcatcgagacatgaaagagaggattagacctacacctgggaaagcagatagaccttcaacaccatccctaactaggccttcaacaccactcctaactagaccttcaacaccaccccaactagaccttcaacaccattcctaactagaccttcaacaccattcctaactagaccctcaacaccacccctaactagaccttcaaccccatccctaactagaccttcaacaccatccctaactagatcttttcaaccattcttaactagaccttcagcatcattcctaactagaccttcaacaccatccctaactagaccttcaacactatccctaactagaacttcaacaccatccctaactagatctttacaaccatccttaactagaccttcagcatcattcctaactagaccttcaacaccatccctaattagaccttcaacaccattcctaactagaccttcaacaccatccctaactagaccttcaacaccatctttaactagatctttgacacatccctaacagccactgggaaatctttctcagttcccctgtccctagctaaggtcttacccaactttcacacttctttctgcttgtgaatcagcttccttaatattggtggtgagagacggtgttatggtcatttgctctgtaaccctggctctcctccatgtctctctgggccaagtgggccacctggactctcctggccctgagtaaggagactccctggctccagcccttgttcctttgcccctcccaccaacccccaacaggctgttatgagtaaatattgggtggacccagtgccctaattaaagccaaaagactattagtctggggaagggtgggggtagggtccgggtacacgtttgctgcctcccagccaagcaccaattagaaggaaaagttctttttcagcaaagaagaggaagggacagccccataattaataacctcattaaggagcagtatttgggcagggtcccaagacacacgtagataagttgacaaagcggtggatttgtactaattcaagcatcagcagcaaccggcctccgccaacgtcctagggtctgtgagtccccagtgacaaatggactgcactggctaggggaggtgaaggtccccttgagtcacaaataggttggtgatgcctagtccctctttgagccttgtacctcagtttatctgcttgtgaatttggagcgagggtgagggtgtaagatgggaagtcttatactactgtgatcagcccagcacacatgctcccatctttctctggcctcattcccaccgtggcacatgctgtgtgaagccggtgccacatctctggtcttaaccgtctttgacagctttgcccacctggcttctggagaactagccactttgactggcctattgccctctgccagctttgtcatccacaagagactgaccaaattggggtggggccccctccagtgctgaattttgaaaactgcagcagcccagtagaaggaagagtccagtggggccagcagtaccttctcttccctggggctttcagaaacaggacacagggagggtgtagccttcctggagggcgactagaaggcaggaagatgaccgaaagcctggaatagatacatgagtgtatgggatagctgtcctttttagagcaccttgcatgaggccaacttcttccacttgctttctctttgggcctgggaggtgaacaggacagttggcttattcttcattttccagatgggagaacctgagagcacacatctggctgaagaattagaaaatcaagggctggacataagcattcgggtatagccgaaagtctgcacacccagtgtggaaggatgccagggaggtgaccctgaggatgccatgattctcgaggacagccttgagtttctgccacctgtagtaggggtgcagcctgggagaagggacgtggctcatagctgctattagagctctgaataccactgaggaaagtctatccctcatggccatcacggagtcatagactccctgaatgccacctgcttatcttccccaggccagattagcctggctggggctcttcaggaatctttggtcggttttcccatctcctgctctcgggcttgccctgtctttctctcttccagaagcctgtgaaggagatgaggtggaggtggcaggccaattgaaatataatcagaataattgaatagcactttattttaaatcgttgcctcccccaaagctgggagaataattggctagcctgtcacgagagaagcaagagacctggggcctttaccagtgccaagcttggttcactgtgcccttggcagccagaagcttcagctgtagctgctccctcacaccgttgcctgctccagctgagtgggtcctagcacctgccttcctgctccactgctccacatgctgttccacccacagcacgcacccctcactcttccgaatgatggctgttctgctcagttgaagcccctggtgaaacaggctgagtggcaggggcagtggggttttgatggggaaaaaaaatacctccaagtgtggtgagaaaggcttgcagaggcaaactcaggagtctgagtcccttactccccagcaggccttggcctcttctgggcctgtgtctgctcttgagcgaagccccctccctccttcctttctggtccctctgcggggtccaagctgcccacgctgtccatgccctctgagggtgaacctgcagtgtcacctgtctctggttttttgatttgtttaattatagatgagttttctgcataatttattccaaaagcctggattatactgtacaattaaatcacattctgatcaacaacttcacatataaaattaacaaccaacaacagtttaatctatgcttgctgcatctgcacacgggctcttttctgtttcccttgtcccttccctgcctcctctcctcctccatgccctcctctctcctcccctctcctcggggtgagcctttgcagctggcccctgagctgggtgctcccacctgaggttggaactagaacctcccagccttccagtgagtgggttctggatggttctgcttacttaaaggcttctcggcaccagcacttcacctcacatgtggttgactttgctctcttgcctaatggggacacttccttccctccctcccttctcccttctccctgctcctcttggttctagacacctgaggcctgaggtccacagctctaagtagcagcttctttcctaatgagctgagtcaacctgccataccacactctccctctgtgccccaccatgccctcagtgggcccttagatcttataaagatctaaaggtcatactgtatggatgtctagcccttaggagactgtcccgtattgattactgcttatcaaggggccctgtaggtgtgttctagcctggtcttgaacttctgatcctcctgcttccacctcctgagttctgtctgcaactgcaaacatgctctaccacaaccggttgatacaaggctcggcaaacactcgaccgactgaattctatccccagccctcccccattacagtatttagacaattattattatccttgttgacaggtgggaaggctgagattccaaggggacagagctctccaagactgcacagctgacagtagcagcctctcccctgaggctcctcaggagctgccttgtcctggaaggagggacaggtggacccaatggagccggtttctttttaagtgtatgtccctatccccatctcaccagatgtctttttggttttcttatccgtaaggaagggctgctgtgcctttacttccccccagttcaggcacctgggaggacaagacatagtcgccatcctctctggttcacgctggtcatgaagtgctgcagcccggctgcacggcctcagcctcctccctcagactcaccagcctgctaatttggcacttacaagctcttagagataagcagtgtcaattcatcgaagaggatggaaaatccccaggatctggagcactctttgttggagtatgacctgtgagcagcactatctggccagggggcatgggcatgaactcagaggtctcagtccacaggaacacgggcaggatttgatccaattacctttgagtgagtgagactatggattctcatgtatctctcagttctcccagagcccccatgcctttctgtgggattaagcccggctatgcctctgtcccggttgaacttggcttagtgtgtggtttttctggcctcaggacaggaatgcttcaggcatgctcacttcatcaggctcctcagtattgtgtatcagcctccatcccagctagcactggccactggccaaaccctagaacccacaaagtcatatctctgtgacaatgagatggattatctgtcaggtcccttttagctcctggacacagatattgccttcctaatttggcttggtttgggtgaagaatcacttgttttccttagcattgcatggataggcaggaagctagggctacaatctgcctctgaggcccagtataccataccacactaagaaccaaagctactcctgaaccccagagagtgaggtgggagagactcagaaagaaggagcgtgtatgcatgccctttggaagaatttgattttgtcctaagatttggttcttctaaaaattattttactgttgagatagcctttttacacgaaatgatggtgactatataaatgatgtgtcgtctaagcaaagtaaaaacttggcacccatgcctgcttttccaattaattgtcttttacctttctgtgagattccggaaacaaggacccatctgcatactagcaaggagtccatacccaggtggactcattggtgaactggtaaatgtggtcagtctgagaaaagccacaagcaatgaatggatggctcttagggaagggagaattggtttgcttgaaaggtgtgatcccaggtaggtggaccacactgagatggacggccccacacccctgagaatatgggcagcacaaatgagactcactgggttatttataaattagtgaagaaaagaaagacaggagaagaggagccaggctggtggaacacaactttaatctctctgctcaggaagtagaagtaggtgaatcagatctggtctacatagaaagttccaggctggctagagctacatagcaagaccctgcctaaaattaaataataaataaataggtaaataaataaataaataaagtcgggaggtagggatagatatgggaggaggtggaggggtaaatatgaccagaatacattgtaagaaattctcaaagaatttcaagatgcgtctctgtttgccactggggtgggggttggggtggggttgtgattgctggcctttgccttttcctgtggtgtaagtgtcccctctgcggctgatttcaatcactgaaactgatgtgctgaactggaaagagatgaacacggttggctctcctgtgtccattcctgagactccagaaaactgtaacgagtctcatgcccaccccttcctgaatgaatgaccttggatagtgtctcagcttcctcacctgggatttggggattttgtttgcctccgtgaagctcgaagctggtactgtgctttgtacatagtgggcacccttctgtagactcatgcaggaaggattatgatgggtagtctatgtcctaaaccaatgaatggacgaggtcaggtttagggtcagggcagagccaatgggtctttttgaagctgggtccttgaccctgcccgttctttccagatataggacggtgtgagactctgtcccattattagcccccaagagtctgtagtctcgggattacaaaagagccacctgccacattgtccaagtgccaccagggccagaacatcagtgctggcgggcagacgggggtcaggctgagatgctgatgctctctggtacctttctctcccgggctggcagctgagcttacagcctgtcctctacaccagttgaggttagatgtttttttcctctatggtggggaacagagttggggagtcaggctgtggctcagcccacaacaagctgaagctaatgcctctttcttttgatgttgatttttttttccccatcacggtcctgacattcagcttggcaaattgcaattagtgatctgcccgcctcctgctctgagttcccatgccaaccgacccgggcacacacaatggcatgagcccaaccccccagcacaggcctgagaaggagtgtgggacaaggagccagaagagagtcctggccctaggtgaccttaggggatgctgttggtcctaattaggttttgggggacagttgcaacttttctgacatcatcctagtccactgtggcctgtgaacccgtggcttctttatgtctctgtggtgggtcccatatggggctccagcatgccaagaccatccagacacctgttcgtctggtccacttacagagattcctttacagcatccttggctatatcctcccatggtcttatgttttcttgtgccactctaagagatgaccccaaattatctccacattccagaagaggaagctgagagagacagagatggtgttaaatggtcctgtggtggtaccagcgtacctgtccaggcctgcagttcagagcctctgcttgccagatctccagaaagggatgggatgattcgtactgaaaccctgggtgggctcacggcagacatccagccttgggtctctgaggaacatctcctactatggaactagaaaggcaaggaccatctgagttggaagtgctctgtcttctgctcaggtgaggcccaggaggcaggttacctctacctcctcctgtttacataatgggttggaggtgacagcagtatcccctccctttcctcaaacttcacctgtcttgtctctgtcctccctggtgtccccactttcagaacagacacatctaaggacttgtctttatagtgaacaatagtctccctgcaggcttcttccaacctgcttaactcccttggctaatccacaatgccctttcctctcctccctggctgccagtcacagtaaggaaagcctaggccaccaggccagacttcaaagggaaaaaaatcacaggctcactctggttcctgtgtctgttccctctctggtgaaaattgagttgagtgagtagctgtcctggtccccctgggtggccaggaattggttgttgcagctgcagctccagcaggccctcctgacatctttctcctctggattgcaggatgcagcactgggcccggcgcctggagcaggagattgacggtgtgatgcggatttttggaggcgtgcagcagctccgagaggtaagcctggtgcacttgctttcccgcggagaccttcttcccagcgggaatgagggaagggtacataatgcgggcgtaaggaggaggtgacattactgaagtaccagatctcatggtgaaacctagagtctcagtctgaccttctgatacctgttggaattgtggtccactgtcatgaacctggtccctgaaagggtgtcttggcttttcagtttttaaggttggtgagctctgtattcgaggtagtgccttgagtgggaacccagaaccttgaggggccacagctacagggtgcacagaagtccaaaagtctcatcaggaagtacatagtatgaccagaccaagcaagacccaggaaacaggatgggaggctgatattccaggcactgtagtctccgtggagtggcaagtctatctctgctaagtgtcgggatgagggatcaaggtgcaggaggggtgattgattaggcgccagcgaccacattcatcctgagagattatgttaatgtttgaaatagcgatgtgaagagcaagccattcgtcacccccagaaggctgcaaaatgtgttgctgtcaggctacaggctggagctctttatgtggaatgcagaggctcagagagccaagatcttccagtaatggaagactctaataggatggtacctctgctggggtctgtgagggaggtcctggccagaatcaacggaagaattaatggaattctccttcccatagttggcctggggacagcagtgtgactattgagggttcaggtaagggtctaggcccagggttcagtaattattgtttctgacatccccttggccattgccagggtgaggagatgtaacctgggggtgggggtgagcaggctaggaccaccctcagcttgtcagggttagcttctatgtacccaggaagtggtaacttggagggaatatattgacattgcttatggacataagacccttagcataagtgatgctaatcagagatggctaattagtgggcggcatggtgaggagggcacccaggcctgaaggtctgagctactagcttgctcatcgttcctcctgagattgctcagacctctgttcctccctttcctggtgctgggcttgaacagcagtagccccatcccactctccctgtgaactctccatgactcagctgctcttggaagcctccagagcttccagagaaagcactgtaggaaaggctgttccagaacaggagtcaatttaggctcaggaatagcactctgcactaaccaggctataagtgggcactgccaagtgcagcggtgtaggataatggaggaatggtgggtccctggaaggtgtggtgtgtgctttcccaagtttcccatggggcgttagatgtaccagtgaagagccctccaggatcttgcacttatgagcaactcagagcatttgtttatgaaaaaaataatgtacacaccatgcatgagatgtggatctgtgtggactactgagcttcctggatggtgaggaccagacgagagtcagtaaacctgccgtatgcacctctgagagacctgtatccgtgtgatcctccttctccgccaggaggtttgcctggaagataaggtagtgacaatggcaaccaacaaaccaattacacctccccactctctacaaatcagcagtgttttcttcattggtcattttctctcctagggctgttttctctccctttggatggagtgtgagcatatctctgactctcaccagctcagaagtgaacaggctgccacagctggcttgtggcagagctagggctcctgactcctgcttcagccagtcctctgggtgcatgagggatgcctggggctgtggggacctgggcagggatgtgtttggtatggcaggtgggcaaagaagtgctgacccagcgtccctttctcttggcaagcgctccgctgctcatggctgccagctctcggggcctctgtcctgctccagtttttcttacctgcttcctcagcctcttcctgctgacagctctgggactgctccttggcacaggatacgctgccaagatgtgtctgggtgggggtgggggggacaggtgtacagctctagagaaagcaagcaaccccgtgggaagagcaatgacttaaacagtgagccccccacctgctccacagcttaaatctgaccccgacactcacacctttactctgggtgagggctaaggtaccctgcttgtgtttggctctgatgggccaggaggatggttggtgcagagctgtaaaccagctgccagtactatccctcttactggtgctgccaagctgacaatttagcgcccccccccccccacctcccgcacctggggctgcccctcctcagacttctgaggcccccaaactcctgccactggggtggtgagagcctcttccgtggctccacttcttgcctgccctgctcctagaggccgccccaccccccagagcttggagcctcaagggctggcagctgcaagagagcagaaactgcagacagtggcatttgggagagttttccttgccttggcattttcctcctcccgaccttatcacaaccccttggggggcatggctgggggcagactgtgacccatttataggttagaaaccatggcataccacagggtaaggaccccatcccatttcctcaactgaccctaggccacctagtctgctctctctgctcccttaatttagccagacacccctgagctatgctctcttgggcactgtagccccaccccagcccttgagcacgcttgccttgtacagtccatgaaagtagggactctaagctgtctgtcccctctacagcccatgggactgagtgaggtctcctgagccccttctccaccctcccccatcagcaccatattgtccccatcctagggggggcagagaacatatgcttgggctcagagctcatttgcataatgaggatatcaaatgaataatacatcaggtgcctgggggtgttgcaaggagaggatgaggagaaagaaggacaggcctctcttgaagcctaggtcagggacattcccacttctgaatggatgtccagggtacaaggagaacaactctgaggcccttgtgaaaagcgaagcaggagagttctcaccaggcatgggacagtcaccagggtcaccagccccgggacaagtttctgacctggtgagatactcccttccaggggagaagaccctttgcttaaactagaagtgaggagaaactgttgacagagctggcttggagcaggggccagagatggccatgtcagagggaccacagcatatcttctgagagcataccgcccatgtcaaagttcacgtacctcattggctgatcagggcagagtgcctatggccttacctgtatctcaaactgctttcacccgcatgatgatcttagcccaggtgcgtgcttgcgggttatcgtcataggcctatcagtaaagaaggaaaaccaaggtcctgtcagtcatctctagcagtcagtcctgtcctggagttcagacaggccagcacgagtgctgggggccaaatggaccagctcagacagcaactccccaaactacgaagcattcatccacaaagaacaggatcccaggtttggaaaaccccagtcccagtttccttctgggtcccccccaactaagctgacatccttcaaaccaggtgattccagtgtctgtggtgtcggcctcttaggagagccaaaaatagcgttcctaacccagtgtcagtggcaccatcctgctccgtcttgtccgcccctggctattcctcctgctcatcagctcagtgctcccaggaatgtgtaattaatatttgcagagtgccacatctggagctggctatcagcagggaccaaagtctgaaaccatccagggtcctctgttgatgccgctgagaaaactcaccctgtcccctccccacctcctccccagctggtgcctctgcaaactcacacactggctttagcatatgctgaaaatgtgccctgtccccgtctgaggagcgtgcacgctgggcattcaaggcaaggttagcagtgccctggggtggcatagaacctcaggatcacagagcgtgggatcagaagaggaaggaaaaagcttgggtgagaagcgccaaaggtttgaaaaagtcccaaaagggccaggcaaaggcagaggttgtgacccctggccccacagtgggtccttccatctggacactgatttgtgtgtacctttgaaaggctggcagcaagcatctccttaggtatgccattcgctgagagtctgctggggggggtgagggaaccccacacatcccctcccagatcctcactagctgctcccccctcctctaagaatcattatcctcgtggctgtggctctgcacttgcttatcacgcagacccccacccctccattgagctgcctgcctcccgttggggcccagtgacaccctcctctctcctggcgcagatgatgatgtgaggcgccgtgtcgtagttgtgggaggtggtaaggggctcgggtgtgaaatatgccgctgggtagggattgctgtcgcttgcctccctaaaaacccacatatattattctttaatggaaagttaattgtcttattattccctccatatggtcctcttgctcggcacccagcggggatgcatggggctgaggggggggctcctgggagggcgtctgaaatgtgatgaggccgccgctcgagcgtaattggttacagagagacgggtgcatcagagcctggccaagccctgtctggacctagccttttccctacctcttccctttttcttccctctttcctacctttgctgtagcaactctccccttccccctccccctacatcatgaagtctgtagcacgctttcctgagtggagatgtgtagtgttgaatagctgctcttctgctccacccggaaatgcacattctccaatgagacataatggaaaacgattccatttttgaagagtttttctaaaagctgtcatatccatggcaggctctgctgcctgtgggccagccaggctaaggtctactcccagccccaggcctccccctcttccttttgggagtgtgagggtgccatgccagagctgcctcagcaggtggaagatacagtgacaggaaaacccagaaggcgcctaggcacgatcatgcacctgcccttcacccctggggtctcaacagggtaaggctgaggctgggagccttgctaggtggcttctaggattctggacatgtctgcaggaaggtactgctaaggtttctggggatccatagacactgaaggatcttgaagggagagaggcctctggcttctagcttttgacaagaggttgctgtggaacacatccaaggtcagctctagggcatgagaaatagcttggagtgagagacgtgttaggtggttagtgtcttctgaaggcagaccttgccctgggctcacactcaggctgagctgggatgggacctagggtctacgccatgagcagaaaggataatgtgggctggaacgacaggcctggactgtgactgtgggacctgggacgcgtcctcctgcctgtttgagcttctactcccccctgggaaatggagatccagtctgtcttcatgggagatgtaggagcctcaggggagcagagacaagggaaggtgtgagggagccctgcaagaagggatgttgtccttcggtatgtccagaacaaattgattgcagtttcaagggttggtcacagattttttttttaaaattcggatatcaaaatgtcctctctgcttttgaaaattggttttctcatcccagctgatcatgacatattttgtagacgttttactgagaaaagcatacagccaccaagtttgggtaaggctggaataaatagcatctgtgagcaaatgaagggtagtggtgtcctcagccagaagcccggggcgccaaatgcagagacaccatggggaggagatagtagaagttacagggtgggacccttacatcccagaagacactgacgacctgatttacccagttagccaacaagtcacctgcttgcctcccaagccctataagaagagtatggcagcttgcttagcatagagtcagggacagtacaaagccaccaggctctgggacagtctggaggttggtaggtcaggccacagctaagatcaggggttctttaggtggacactccagggatctcagggtctcctgtaggggtccctcatctcaaggaagagacattcttgaaagacatgagcagaaccttccagatagacagatcttccctgaactgaaagcccctcggtcctgttgtctcagggattctggagttgcctaccgatacagaaagcctacccaatggctatctataaagcaaggcacccctcaacacacacatacatggggagaatgttctggtgaacacatgggctccctttgaagatccccagagaggccagctctgtgacaggacaacagggctcagcgtctatgaagacccagcccttgaagcttgtactctggaaagtagccagggactctgctcttcacccctcccccagcttccgcactcatctttgaagagtgactgagctgctacatctagagccaggggggaggggggcgcaggggagctggtcttggtgatccagagtgggagatgggagatgggatgggggggcctatgggtttccatcctgagccatgggggacagttgacccagtctatattcctccccattcccttcttatccattgctggatcagtggcagccatgggggcacttgactcagattcgtggagccccaagcacttggcagaagcagagaagtaattggttttgacaaaccacagccggcccccaggggtagcagagacagtgtttcccactccccggctgaaaatggaggtgtcctctcttcacctctcttgagtacagctgtgctctctgtatgtgtagagatggcgtgtttgtaggagaaggtgatgccacagatgtggtcttccctacatgtctctctagcctggagacctggagacgctgaagggtgacttattatttcccacagagggaggagaccgaagtggctggatcctgagtggacccctaaggccctgccttgtctatccttggctgttcataagctagccacatgaccggcacttaggcttgggtgcctagtttccaggtgcacagcaggatgagaaacaggctatgcacacacaggactcctgtgtatactatgcatgcaggtactgtgaggacagatgatcaactaatgaccattctgtggatggataagcaaaggtaggcaaagatggaagaagcagctgagctctgggtgtcccacaaggccttgcgcaccacattgcccctacatgagggaagctaagtcagtgcctatatggggctgccaaaactcaatctacatacgggaggccctgggtgctttctatgaggaaatgggcactggctgggagaggcacactggagaagagctggctgcacagggttgctggcatctgcctgaagcgagggagcaggggccgttctggagtggtgtgcagtcttagctaagggggaagcttcacacagaggtagcaggaagctttgcttaggcctttgggcctcccagattccctgtgcctgcccttaacctcattggactctcttctaaatccacctgctatccttcctccctcaccttctccacctctctgctgatttaaacacaggccacagctctcctcttccagaaagccctctaggtcagtgccaaggcccacactgcctaagacttcccacccccatcagcttttgcatctttaacgtacacataggctgccaggcacatctgggagacccggtcttgtgatttcattatgtggagtacagaaaccatggcgggagggtagggttatgcccagactttccagaatccaccagaacaaacaggaagaccacgagccctggcaactcactaagacacagtgccttcatgctgtgactggcatgaagtggcacctgggttgaccactgtgtacaaaagggaggataagatcggcatgatgccgagcgggagtgtgagtgtgcatgtgtgttcatactgaacagatacctgtgtgtgagcgctacaagggaagcacgagcaaatgagtgtttgtgtgtccatagaagggagtggccctgcctgtctgcgtgtatcccacacagcaagcgtgaccaagcaagtgggtgcatgtggatcaacgcacagctctgagagcagcctgtggaagcctgtgcaggcacagcacagggcagggtgggcctagaggaggcagatgccaagaattctgtcacctaagcaggtgagaactacttaactgattcgttagccaagctgagaagtctcagttgtggctgaggcacacacgttacatacacgctttgcccccccttctcccctccctccagtcatttcccgatagtgtgtgcatcttccctgcagtgggacaggatggcatcagttgtccgtgcccaggatgaaatgactccacagtggagatcaggggctttgtgtggggtagttcttgatgtccttgatccagtacaaaggctggaccttgtccctgggaactggccgatcagaggggacagacaggttctgtgcctcccaatgtgtgtagggggctctttagtcagcatgcattgctgggtgattcttcagtcagttctaccagcccatcatgctgtccctgagttaatgcctgtgctatcctatccctgcaaggagggccccttacatttcccagtaaccgtagccccaccctccttcctatggttgtagctgctctgctttacccctcccattcgagaacagctccgagacgctggtgagctctgtcccagagtcctacagtctgggttcaatgctagtacctcctgccctcactcctcaaagacccccccccaaccccaccccagtactggagcacatcattgcgtagtcagcctgggtagctgggtcaagaggcaaccacttgcctcttgatcaggtgttgacagaagagctttcattatgctccatctataggcgtggaataaattggtgtgcagtgaatttattcttttttaaagagggactttaccactggggaaaacttttaaaaggaacatttatataaaaagcaattaccatgccagtaatttttatgtattctcccccttccatccatgcctttgtgcttgaacgtgaccgcctcctgggcagctgcagcctggctccatggcagccttgctacagcttcctgcctggaggagtggcctcttccaggaaggatcagcacacagggcctgggcccagcaggggtgggaactccagaagcgtggctgggtggatttgtgttccaaacttgagtcctttggaaatttcctccagggtgctgttttgtcctgaggttgcttcagtccctgtctcgggccgggccgggtacatcctctcttggcagctgctgagtacttagaggccctgcttcccagcaaccttgctggccagctccttgaaggagagggcactggtgcgggagcaggtatttcccctccctgggtgccactaggggtgccactctagagcaccctgctttccagccattattgcgctcgcacgccatgccgtgcattatgtaaattgtctccattgctgagtggaggggggagatgctctgggggaaggaggcggtggggtcttgagcctacttgggggggtggggnnnnnnnnnnnnnnnnnnnnnnnnnnnnnnnnnnnnnnnnnnnnnnnnnnnnnnnnnnnnnnnnnnnnnnnnnnnnnnnnnnnnnnnnnnnnnnnnnnnnnnnnnnnnnnnnnnnnnntgaaaactgctttgcttcagggagggtctgaaaggttttctttctgattaggacctccaggagcctgcacgccatttacacctcagggcacagcttttgggggcggaaactaggggttccctggaagctgaatgagctgcctcaatagatgagacttcccacctcagactaacatctccggtaggacatatcccccttatccacagggccactattagaaactcatcatgtagccatgaaaggttcagggccgggaagatgactcagtgggtaaagacaagcgtgaagagctgagtttgaatactcagagaccatgtaaagctgggtacaggaatgtgggtgtgaaatcttagtgaggttgaatgcagcaacaggagactcctggggggaccactggccaactagcctggcatccccggcaaagaagaacaaagagactatagcttgaacaagatggaaggtgaggtttggtacctggggttgtcctcttacttccatacatatgtcatgacatacgtgtacttgcatcatacatgaatgaacacatacactaataatgatgatggtggtggtgatagtgatgatggtgatggtgatgatgattatagtaataaagttttttaaaggtcatatctagccaaggagctgagtcatgggatcccctcttccattgagcccctatgaaccaccagtgaccatataatgtgaaaaggttactatttgggacaatgccagcatcctggggcatcagcagctgtgaagggtccttgttggggctgtggtgccaccaaagcatatgagggcatggaagtgaccagctctcataaaggctagggcaatgatggggctctggagtagccacaattcctgttcctttgaaacatggtctgctgttgagaactgagcccaacagtggattggagtccagcgtgtcagtgcctgaagtgctccgagtttttttctaaaatgctcatctgagcctgaacttggcctgaggctctaccagtacaggccacatcctgctcctcctgtcccaggacctgagcgcccactctgtcccccgaataaaaggccttgaagttgagggatggtgagtttgtacattccctatacatcatgcagaattttcattccacaaggactgtgggagttaacaaactccatcctgcttcccagacagccactctacttcccaaacccttcccaggctggattgcctatgagtctgtatgagatctgcctcttgacgttggtataagctctgacagttatgaaagccttggggtgtctccagccttctttggcactgtccctcagccccttgaaatgggtggcgttatctgccagatcactcctgtggttgctagccctttctgatgacttccaacattggggaaatgtaagcaaggaacccccagaacagaggccacaaacaccaaattggtcttttggactgcagagcctcgtctctatctgcggatgagagaatgaaaacatcaagttgccttcactttcacactgaggaaaatggttagctccaccccttttgcagcccctgtcctgaggccaaatctaaggtcaaagtaatttcctgtctctcatccttctacctatattatttgctatcttctttccttcgcttttctgccttctccaccccccctgacatttcgagatggatttcaaaatttagggtgttttaagtctgcattacaaggcacctggtgtaaagtagcggttatgccagacaagctgtgttcgcacagcagccccctctgcatttccaactccccagaggctgacacttccactctccgagctccagatcccagagtgacatacttacgctgcttctgtgtagttgttcagttttagaattaccacgggcacctcactctgggagatgagaacttgccccactcccagtcctggccctccagtgttattgtgtgaaaccgttagatttgaactcactgctgaccttatcctgacctcgcaaacgctgttcagaaccctatgccatagcacacgcaatgctttagttgtttctaaaggcgacagctgttggggctttgtttcttccatgcttagtcttctgtgatcctgtactttgttctgcctctgcctcagcctcctgccattttatctgactctcctttccttcaaactgacacctctaggttctattcacaagaaaagttcttgtctgagcccttccggcttacctccaatgaagaatggctgttttccaaactggcagccctcaacactgctcgcaggtctttgtctctgggatttgctcgacttctctaggaggagtccactcttccctgggtcctgtgacttctttcttcttccctgatttcttgatttttttttcttttctttgtctggcagagaatgttctcattgccttcctgagaaaggttcgagagacgccaactcttggcttgcaggtctcagccttcctgcctctgtacccagcacgggaatcagaggtgggttagtgtccacctggaagccctttgcctccagtgtattcaggcagttccttcagcctccctcctgagacagagtctcaaagcgttcagagtcctgacctgttttgtttccttaaccagaaagatataatgtcccctccgtagggtgttcaagcaattccacactcaccttaaaggtatttgctttcattcttaaacttacacactgtatactcatgtccttcgctctggggattttaaaaaaaaatctttcttttgtttgtttttgttttttcgagacagggtttctctgtgtagcactggctgtcttggaactcgctctgtaaaccaggctagcctcaaacttggagatctacctgcctctgccttctgagtgctgagattaaaggcctgcacaccaactctgggtttttgagggtttcttcaatgatttcttttactcttttctttcattccttttctttgtactttaattattttgttttgtgagaccccttaactcagacacttctctccctctaaggctctcctccccctcctcccttctcctcccctccccttctctcctnnnnnnnnnnnnnnnnnnnnccccctccctcttccctcctcccctcctcctctctcctccgttctttactccactcctctcctcttcttcctcctctctagttttccgagtctgtacttttgtctggcgatttctcagttgtgtgttctatcttgctatcaagctttaccttttaccaccatgttttaagtttctcagaaggctttttgcacctttttaaaaataacctcttgttcttgtttcattgttgctgctgctcgcagttgtgtcccttttttagaaaacctttttatttggaaaaaaaaaatagaaaagaaacacttactggagaagttggagagaccgtgcaaaaaacagctctgatgctttccccagttcttccagttgcctcgcagatccccagcacaaatgtcaaccaagactccaggcagcaccgctggctgccgcagtgaagacctgctagagagccttactagcttttactagcatgcctttttctcttccaggatcaaatttaagatagcccaatatatttagctgtcctgtttctgtaatctcttctaatctgtaacagattctagatctttacttgtccttccttactttttttaaaaatttatttatttttacttcaggtgcactggtgttttgcccctcccccatctatccctctgaagattctccattattagaccgagggattacactttacagagacatgcgcccttctcggcatgttgtactaggaatgcatggtgtccatatgtcttggtactggtggtgttagtcttggtcatgtggttatgggggaggcggtagctgtgtgctccctccaaagtgaacttgctatttttccatttataattttaaaaacctttcttggaggacattctttgaggctgtgcaaatatcccatttctctgggacttgcgcctgtcagctttagcctcccgctgctgcagctggcctgcagcggttattactggagtgctacgatggtgctttcctatttctctcgttccttctgcatgtattaacgggaattctgtaagaaagagctgtctccttccctctgtttattctttcagttatttatttcagtgtggactccactggtctttgaaatctatagatataattcaatagtattggtattaggttttggtttgtttgtttgtttgtttgtttgtttgtttgttgagacagggtttctctgtgtggccctggatgtcctggaactcactctgtagaccaggctggatatgaactcagagctctgcctgccttaaaggcacacaccattgacattactgcccagctatgattatagtgttattgggcacattgctctcactctggatcccttgcaagctggctcctgtgccctttgggagtgcccttatccttgcatgagcccttatttnnnnnnnnnnnnnnnnnnnnnnnnnnnnnnnnnnnnnnnnnnnnnnnnnnnnnnnnnnnnnnnnnnnnnnnnnnnnnnnnnnnnnnnnnnnnnnnnnnnnnnnnnnnnnnnnnnnnnnnnnnnnnnnnnnnnnnnnnnnnnnnnnnnnnnnnnnnnnnnnnnnnnnnnnnnnnnnnnnnnnnnnnnnnnnnnnnnnnnnnnnnnnnnnnnnnnnnnnnnnnnnnnnnnnnnnnnnnnnnnnnnnnnnnnnnnnnnnnnnnnnnnnnnnnnnnnnnnnnnnnnnnnnnnnnnnnnnnnnnnnnnnnnnnnnnnnnnnnnnnnnnnnnnnnnnnnnnnnnnnnnnnnnnnnnnnnnnnnnnnnnnnnnnnnnnnnnnnnnnnnnnnnnnnnnnnnnnnnnnnnnnnnnnnnnnnnnnnnnnnnnnnnnnnnnnnnnnnnnnnnnnnnnnnnnnnnnnnnnnnnnnnnnnnnnnnnnnnnnnnnnnnnnnnnnnnnnnnnnnnnnnnnnnnnnnnnnnnnnnnnnnnnnnnnnnnnnnnnnnnnnnnnnnnnnnnnnnnnnnnnnnnnnnnnnnnnnnnnnnnnnnnnnnnnnnnnnnnnnnnnnnnnnnnnnnnnnnnnnnnnnnnnnnnnnnnnnnnnnnnnnnnnnnnnnnnnnnnnnnnnnnnnnnnnnnnnnnnnnnnnnnnnnnnnnnnnnnnnnnnnnnnnnnnnnnnnnnnnnnnnnnnnnnnnnnnnnnnnnnnnnnnnnnnnnnnnnnnnnnnnnnnnnnnnnccagagaagattcttctaacatcccatttgggcctcagggttccccaatactggggttcccctgattctggcagaagtgagaggcaaagggcagtgccagccttggagagacatttagacggcttgcttttctccctaactaaggtccagccccctgagtctcagatccctacgtgcagagaaagccctgacaggcctggctcgtgcactcagtgggcagggctttcctagaagaacccgttctgcctccgatggcaaggcatcagctgttcttgggaagccccagtgtccaacacctttgtaactataatctagcaagtaagactcccacggccagaagccattaccctttaaggcagctcccaaatcctcaacctggttctgagtgaccaaatgacaggttctcttttcagtgcacgccgattctctgagccccacccagagccatcccttatctgaacaattctgtcctcctgagaaactgaagaagtgaggttggatagggtcttaaggatggcccgaccaaaatcaaccactcagatcaaatgaggtctctgtgttctcatctgtaaaagggaacattgtctcagcccttggaaccatgttgagacaaggaaggaagtgatgtcacaggtaagagaaccaagctgcaagtgtgtaaaggcagtccagaagggcatggcactacagaggcaagagctgaagatacggctacactgaagcacccacggcctacgggcaagtgggagcaaggtggagggttctaggagccagtgggagacattcctcactctcatacagagggctgggctggctaggtggagcagcagtctgttcttgaaaagctcagagctaagataatggaatgagtttttgcaggcaaccgctggttacagggaaagatgtttagaagggaaagagccttcacttccaatttctctgatggcatttccagagactgggctggctggaccacctgccagagcaaactttattgctttttgtcctagctttattctgtaaaggatggaagaggggacagaggcatttcagacctctaaagaggcagtgctgagtgttgtttgtttaggttgtgtgcgtgtgtgtgtgtgtgtgtgcgtgtgtgcgtgtgtgcgtgtgtgtgtgtgtgtgtgcgtgtgtgcgtgcgtgcgtgtgtgtgtgtgtgtgtgtgtgtgtgtgtgtgtgtgtgtaaataaaacccagagcctcacctgtgctcacaaggactccaccactgagtgacctccgcagcccagcaatgatcttctgggggaggctgttgtggaggcgtggggttgggatgagaggccagccaggctctactgtgctctgcctattctgacctcttcatggtaggttggggtatctgaactgtctctccctgtttttggttttgtttttggttttttttttttttttctcctgcaaaattgattggtgatatagaagtcactgttgtgatttatgctccgggtctggggtggttagccacagaggaaggacaggtggacagagtcaaactaggtgggactgtgtaaggagagacaaatggaggagcagacctaggggggcagcaagagtcctgatgagtcctggcatgacattggggaactgtccttttggggaattggggtccagagagggtcaagacaggctctcagtcacacagcaagccggggccagaacactagatccagaatcgcatcccaggtcaatgggtgaaaatgatgcagtcaaactgttgtgctagttgctgtaggtgagatacatctgtatgacagatgcactcagccgtgaagggagctggcccatcctgtgaactcctcccctcccccacccaataagcccttgccttttttttgccctgtgttttatgggaaccaaccatggagactttggttcagtgctttttaaaaaccaccacctcctgcctgccaagcccttcacctttgtaccggactttctctggtgagtgcagctctccgtgcctcagtttcttcacttagaaagctgggtctaagggtacatgccctgattctttcctggggtgtctcgaattttaaacaacacatactgttctgggctgatgacaagaggaagtactggtcggtggctgatagacatcctccatggtggcactggagggagggggaacggacgttgaaaccctgccctcctggaatctgtcgcatgcacgcacgttgacaatgcttggcactggggacaggctgggatggatggagcggagcgtgaggaggagtgggcatgcaggcccgagtgtctgttttgctgattgctccttttgctttcaaggagattaaactatttttagtccatgcctactgctggtgagacgctggaggaagcctttccatcgttgagattttctggaagctgccaagtgtggtcttcagctcaattctgggagcctcccagagtgggagggaggaacatttccatctgggggcttcggggacaggctaagatcttccctggggtccttgctgcgctggcctcctcaaaccacgctgcctcggcctgcataaagcagtaatctgatgtgcccgatgtttgtaacgctgtgtttaaaaaaagtaatttattttctaattattccttgtcttgcataaccatgcattgccaaagtgtcgctatttaaaatatttatctctccacgccgcaggagcagctctggagcgtggagggggaagaaataaaagtccgcgtgccagtcgcaggcatattactttgactcgtcctggcggctttgacgtctccctgtaaatacatttatttttcattaggacgtttctgagcttgtggcccccggagagcggagtgattacgctgttcatctgcaagcgatgcaatagaggggtactcgcagaatgacttccgcccagagcatcctgtgcctgtctgtgtaggcaagggcccgagtgcggggcttgagttatatatttctgaacttcatgtgcactggatggacatgtggtcagaggcattgaacttcgatttattggggaaactgaggcccagaaagggaccgctttggagaggattcaatcttactggcaaaatgggcagcaggccactggcctgtcctagccctgatgccagaaacctgtctttgcagctggaaaggcttctgggttggggtcagggagatcctgggagatttcagagagggctcatgcagagctcaagccgagggcctgagggtgctgccaaaaaggcttccaggagcaggtctcacaactctctctgtcacttatccacagcggccgatttgagccacagcgcagggtctggtccaagggttccaaaagcatccctcttcctcctcctcttcctcctcctcctcctcttcctcctcctcctcctcctcctggtagcccattgccagcaggaactagacctgactcctccctcactaacaggctcttttccaattaaaaaaaagaatttttttaaaaaaaaattttttttttagctcattgagtcaaagaaagagttttatgctgaattttaaaataccttatttttttccagtctctaaactgctaatctcccaggctaagggattctgggacaaaggcaaggcctggaagtggaaatctgtaaaattagcttcagcggtattagtgtttgcagttgaagattgaaaaactgctttcccagggcctgattggaggctccactctcctccaggaagaggcaaggactctgggctggcactgaggacaaatcctgggaggctgctatggggcctgggagccaggctgccttgtgctagaggcctagagagtgtctgcgtcccaagtcccaagctacccccagcagctaacagcttttccagttctcaggcacagcaggtgccaagatcacgctctggagtccagctgggccccttcctcttcttctttttttttaaagacctcctggacactgttcctctcccccccccccgtagccccccccctcagttctcaaacacgtgagggttgggggagggttccacagccagagagaggggccagctctggtgcctgtgggtgcgcccgcccgtatggcccatcaggcctcttgtgtgcttgattgcctctgattggctgcagctgaattcagcaaaagctattatttgcccttgatgagccaatcagatggcctcattggccattcagagcaggcaccggaacctgagggtggggtggggggtgggggatggagatgggactcagtgagggggtgggaagctctaaaacagatgcaggacctgagcctgtcggtgtccaccacgaccttcacacaggtcacacccccttctcctgacttgtcaccccaaaccagggcttgttgcccaaccccacctcacaattcctcactctgtaacacctttccatatacctctgcatgtctaaacccaagacttgctctatgaaatccatctctccaacccaatgtaagctagttcctctgaggtgccagagtcccctggacagccctctggcttgctccaccagcaattacagaaatcctgggtataacaatcagaaaaatagttcaacctggtgactcaggcctacaatcccagttactctgtaggctgaggtgcaagaatcacaagttcaaaaccagcctaggcaacttaatgagactgagtcacaaaaagtaaagagagaaggtgggcatggtggtgcacagaccagcttcaaggtcagcctggtctatggagtgagttctaggacaatcagcgcaacacagagaaaccctgtcttggagaacagaagtaaagagaggactaaggcgatattgctcagtggcagagcccttgtctcccatgcacaaggtgatagggccaatcttcaatgcaggaggacaaaagcagcagcagcagcatcaccaccatcaccatcatcatcatcaccatcatcagactcagatagactttcagtcctctttcctgagactgtggactggagaattcctatcacaaaattcttagagttttattttccttgcctggacaagggccttgtaatcaaacctctctgaaggggatgtgaccttagtttggggctgggagatatgaaatgcaggcctagggagtggggcagagatcccacagcccacagttctccagcctctgttgactggctgagggtttgacagtccagggtctcttcccaaataaatacacaggtgatatttgaatgtcaagagaccagagcatgtaacatgctataggcggtgtatgcacatgtgtgcgtgcaggcatacatgtgtatatgtcacagaggttaagaggacctggtgggatacacagactaactactagggggttaggaggctctggaggcagctagggcagagagaagatttcgtccagtgagaagcctgggcaaaagcctgagagtgaggatggaagagagtgtggtgctggctacgcagcgatgtgtagagggatcagagggagaaagtgaagcctttgtttggggtcatagtccttagaaattaactcctagacatgggtacaggaggcctttccaacaagtccgtcacgggaagtcttagcctttcgtggaatggtgtctcttctatagactcagagtttatgggacctcaaagttcccaagtgcagtgacccaaatgccccatcccacgactcaggactccagtctgagacctggctgttgtgtcaccgacccggtgggattgggacgataacccccctcgggatccttgactgttataattaagccctgtgcctgaccctcagctcctctgcctctggctgcaagagatgagagagtctttttatatcctgccaaaggggcttctggctttcacatttcaccttaaattcgtgattaatcgcactcgttctttgattgtctctctccaaagtaccaatagcctacagcaacagtcaccccattccacagtccttataattacacttccctgagcctctcaaccgcctgaaatattgcgcccattcgtaagtatcccacctctgttcacgacgagtgagcatttgatcagttgtacctgtcacacgccagaattgctagtgccctacctacctccacagtgaggttctcgttgacagttagacagtgcccactataggatctgccttctgccaccagctatggtgggccagttccctggggtcagaactcgaggtgaagacggtctgcacagtttacttgctttgaagcagggttgattgggtagctgaataggtttgactgtgatgtactcttgaccaaagcctgaactggttccacctagaatggaccgagccctcagagatgttcccagatgaggccagggggaccgagcctttgtcgttttttatactacccagagcacaatgggtctgctctcttctactcaggcatgggctagggaaggaagcagcagtgtccctggcatagccgggggcagagatgggcataagaagaacttgacctgataggtaactcctgtccacattctggattgtctctcaccagctctgagccttcaggtgagcccctagggtcctctcagccagtggcacacatttcagcggcgcactgccataccttcagttcccaggatacagtgagatctgagagtggtaccggaacatggtgtaagctccgggctgcacacacatgggccagggtctgagcttcattggcggtgtagctgggagtctcctcatgcagctaagcaaggccaagggctgtctggatctgaggaaatgggagatgcgagtcaagtctgtcttgccaacaaagccaaagttgtctgagtaccctagaatctcattacctgggaggcagatagaatggtgagttcctgcccagcccgggctataaagaaattctctgactcaaagaaaaaaaaagttttctgagtgttcagggaagagtgtgtaccgggcaagtggggaagtctgctcagcctgttctctgtgggttaattaattagtggcagatggagactggtactagtgacacttgctccccaaagtgatcaaagagtaaagagtggttaggtagccagggagctaagcttagaaagagctctcccaccccccgggggtctggagagatggctcagcggttaagagcaccgactgctcttctagaggtcctgagttcaaatcccagcaaccacatggtggctcacaaccatctgtaatgggatctgatgccctcttctggtgagtctgaagagagcaatgagcaatggtgtacatacatacatacatacatacatacatacatacatacatacatacaaacaagagcccctcggtaaggagaagaataatcatgattggttaaagacactgaaagctaccagagattggtcaaagagcccttgccaaggccatggatgggttcctttggttgaagccttgtgagcaaggcagatctgagcagcatgggcttattccttgtttgaaagaaccctatgcaggtctgaaggtggctcccaggtacatcccatgtctgtgtttggcacactggctatgtattcctacagcatcagcctatgactggtgtagaagggcgggagcataaggattcctgccttacgggtgtgaccgcgagtagggaaaccttggcattcaagagaaaaggaaagctctgagccgggcatgcgcaggctggcatgccagttgaaaaccatcatcagacttagtgttccaacagcctctctcactttgtaaaagccttttctttcaaaaaataaaaggaaattggaggcaagtacaatatttggctgtggcggctgttaatttggcactagatgtcacctccgcctttctcttccaggatgccaagtgcgcctttcccagctctgggcgggtgggtgggtgaggtgatgggggtgcagggcgggctccctgagcctcttaagattcgagattcatttccttaaacacacattgtctcactccaatttcacgtccgagcggttctggcgaggaattagcagcccctgggagagagtgcaggcgggttctgtttacacggggagggcggagggcgggcgggcaggcaggaggtgagggtgcaagcaggggcttggggctgtttgcacaaggagcccatggacagcctgggtcctgggttgaggctgccttccttggccagaggctctcaaaaggacccatgtggtctcctatcacagaacgtgttaagtcccacccatttcaggtgcttaaaggaagacaccgggccctcaagtcaaaagggaccattcagcccaactgtcaatcaaagaccagataagaccagagggtctacttctggtggactgccttctgcttgtggacttaatatgtctagaagtcattccttcccctgagtgcagcccgtgcctccatctccatgtctcctttgtggtccatgcccttgagaggctccagccctgtcattgtataggagaagcagctacagggcataagcagacccacaggacccggcatcaaggccctccctctgtctaccagttcctgagtccaaggtgccatgtagcaggtgtggagagcatgacttggggctccaacttgtttgctttccccttcaaagtcaaacagccacagtacgtgttggaagtgatccgaagggggtctgaggagggctgtgttcctccctactcctccgtcttaaaggtggctttcaggctgtgcatggtggtgcatgcctttaatcccagcacttgggaggcagaggcaggcggatttctgagttcgaggccaacctggtctacaaagtgcgtttcaggacagctagggctatacagagaaaccctgtcttgaaaaaccaaatatatataaaggtgcctttcagacagcaggaccacagacagagccttccttccattctacaggtacacaccctgggctgggctgggctgggctgggctgggctgggctgggctgggctgggctgggctgggctgggctgggctgccctttctgtcttccacttgcccatagcctatagtcagcctctacccaaaactcatatccctctcagcctgtcagactcgggtacccagagagaccagacagggctgggcctgaggcatgctgtgagggaggtggcccaccccccccagctctcctggcctgctgctcattcatcaccttttagaagggagacctgctaatttgttagcccattagctgggcaccagcagcatatgggcctgattcctgctgcccttctcctgcctgcctgcctgctgcttgtctcagatgtcatcatcaggactcatggcattgcaggcttgtcatgggttggtgggagctttatcttattcagatgcggagcccctcagtgaggcatcagagcctttaaaagtacactctggggttcaacaagcctacacttggagttcagtgacatctgcagttgagacagagcctcttctaagctgtggactagggaggagcctgctttggggaaaacagtccttattcgtagcgttcagagaaaggtggttttctctagcccaccaccagcaggcagccatttccatgctgtttctatatactcttgttggaaacaggggtggtagggaggatgttttgtctgacaggtcctttattgtgtcctgcccttgagtttcagtgatagggctcttttgcagcctggcatctttagtgggagattctgagttacctggaactgcacatgtggcagaggaagagctcttgtctctaagacaatgggtagaaaggaaatcgactcctgggtttgtgcggaaagactccaggacatgaggctttgcccatggaaggaaggattcctcacctgtcagtcacagatgttttccccagcatgcatagatgaacctggatacagacaccccaggacacacatgtatccagagacatgcatcatggctcttccaagtacctaaggcccacattcactgggacatttgtttggcatgtgctgcccactgaaacatcatcactctcctaatgtacacaaaagtgtgcccatgctgctagatactacccacacggtgtgcattcaacatatgtgtaatagccaagcttatgtgcaagtgtgcaggctccggagggagcacacacacacacacacacacacacacacacacacacacacacacactggctcctctattatctgggtttatggtggaaataaatttgcagtttagcagccctaaacctgccaggagtataaccataaagagcggatagcctgagctccattgagcctcgctgagaatgcactgcacaggaagggtttcccagcctgcttttcgtgacatcctccagggcagaatatatatatataccaggtctaaccggcagaggggcctatgcagagactgcctacgttatgctgaagggagcgtagagcccaggctgcaggtcaccaccttgggactccagcttgggacatctcgtcctaggatgggaagtggtaactgtagctcaggccggaggcaggacagtctataggccatgcggggaggacacagatggcctatctcctaccctggttctaaggactgaacaggaggagtactgggaacagtcctgagccgtcctctagttggggatgtgacagggcagactacagctacatcctggaagaacttcggggcctctggtggcagaggtgagagcgaagggtgcagcccagcccagggtacaggcaggaaagccgaatgattggctgagtccagcccacagccttctctgggaagatcaggtcacagaccctgcttagcacagctcttagcgggtcctttagggggtctcccagcgggcccagtgggaatgagataaggaaggacacagctgtccattctcccgtgcctgctaaggaggaaatggggccgccttacataattggggcaatttgttccactcttgtcctcctggtatcatggctatcaccccctccttgctcagggagtccttgattgagcgagaagctcaggcctccctctctccctccggctgggggttgctgaacagagggtgtaggagccataggctctgtcactgctgagatctgccagatgtctaggccaggagaaaatggaaagggctaagtcacagcatatgtggccactcaggcctatagccctaaatctgcctggtaacccattatgtccccagagaatttgcatgggcagacaccctcatgccgggtctcagtaagggaaggggtgggaggcaaaaatatccctccccaccctgaatctccaccccctccccccagaaactgacacttggccttgtctaaggatgggttttcccaaaatccttctgaaaaaaacagaatttcaagagtcactccctccgggtctcagcctagaacatatgcagtatcccctgacgtccatagggggagccactgagcagaccaaggcttcagcggatgtcctgatgaacaaggactctttgatgtgaggaggttggctttctgtggactatttcttcagctctctgtgaggagcagctctctacaggatgtttaaaacgggatggacttgcaaacccaggatgcagctgtcatagcctgagacaagtggcccaagatctatggctgaggggccagttgagtggtttcctgaagactagttggtggggatagggctgggtctggggcggggtctctgtctatgtgcatggttaaacctcatggtcactgaggcgattaactgtgtgtccattgtcgcatctatgaagcagggacagcaacaggggatcctgtggatgtgacacagtgaatgactaaaatggaggtttgcttctgtcctgccaatatccctgcagtaatcatcaacccctttcagctgtccccaaagctggatgaggaagtggtccacatggaatgtgggggtgggagagtgcatagcatctgttctcctgagtaccgcacacttatttagaagttcatgaccattcaggctgagggcctgctagtgtttgccagcatgtcaggctgacagtcctgtttgcacagttggtttgcatggcaaacactgctcaggcccacggaaggtaaatgctggctccgggcggttgctggaggtcttgcattcatagagaaggaagctggagccacgggtgtctggtgtcctcccgctccccggcagtgaaataaggggagactgaggtgctgagcaggagctgagcctgctgaggacccaccagacgcaggtctgcagctcaccagcccccggctcaggaaacctttgagtgatgggcaccagcattttccagaatcagggtagggagcttcctgagaaggtttaggaaggctatgagtgatgagagggagagtgcatgtcccctctgggtttgtgtccccactgtgtgtgtgtgtgtgtgtgtgtgtcctgagtgcactcatgtccccaagtgcacctgtccttggcatatctttggtatgtgcaaaaggcccctgtgtctgggtcctattggtttctttgtgctttcaacttgttctgcggaagatgtaaaggcacttacaaggatacataaaactcaagaagagctataaactgagagtgggaaagaaagaaaaagtgaaaaacggagctgggaggtactgacagaggaagtaagcaccatggctcaggtgtgagtgctccttgtatcaggtgtgagtgctccttgtatcaggcgtgactactcctcgtacactcattagcacccttcatgtgggcagcatcagcttggccctggtgcccgctgccttattgctaactcagatttgagctatgtgatcaacctgcatcgaggacttggggggcaagcccagtgtctgctgggacccagctcagaggccactgctgactgggtcatgtctttactcccaccaggtcccccacatcattaggagcctctcccataggaggacttagggctgtgaccttcgggtagccctggccctctggaagctgcaccgctccgttgtttaaaacactgtccatggttttgttttgtttttgatttatttattgttatacataagtacactgtagctgtcttcagacaccccagaagagggcatcagatctcattatgggtggttgtgagccaccatgtggttgctggaaattgaactcaggaccttcggaagagctgtcagtgctcctaccagctgagccatctagccagccccctgcccatgttttaaggtggctttggaacacctcttgaggtctggatggaagagccacagagccttacccaggcctgaggctgtcagcgacaggcatcttctgcctaaacacaagatacaagcggaatctgtcagtgactccctcggtgccggctgtgagggaggagttaaaaccgatatgtgacgtaggctcgggtgtgtgtgcttttctttccttatttatttatttattttttgtttgtttttcgagacagagaaactctgtcctggaactcactttgtagaccaggctggcctcgaactcagaaatcccctgcctctgcctccagagtgctggaattaaaggcgtacgccaccatgtccagcttctttccttaatttttaatcattttttatgtgtaccagtattttgtttgcatttatgttggtgtaccatgtgaatgccttggctaccgtggaggccagaagaggctagcagatctcctggaattggaattacagacagttaaagcttccacgtgagtgctaggaactgaacccgggtcttctcaagagcagcaaatgcttacaaatctctccatccccagcaggtgtgtttgaagctgtctgtggagataggtgtgagacaaaaacactggggtggccttgccccagatggacctcttgacgctgtgtgggaagccgcagccaccacacaggcttactgctatctctgcttttatgccccgctgttaccatgtgaagatctcatattttcacaaaatcagccagctcctaggctctggcagcctctctctcacgacaaaggctgcaacagatgtagtcactgtttagtgacaccttaaacagtaagtcttagcagtaaaggatagcctttgagaccagaaagttggtccttggaggacagcgtgtgcaaagaaggtccctagggcgttggaagcaaccctgcaaggaggcctcacaagaagcctccatgatcccacattctgaccatcagtctttgaggaatgtttggagcagccgggctgagaaaaatgaatgtccctcctaacgagcaggactggaattccaactcacctctctaaacattctagggcataggtacaagggatggggagacttttccctttggacagactctgacccctgtggcacctcagtttcttcatctttgggacaacaaagcagctggccttgtcaccagttatgatagagtatgaacaagaaagcctaaccggggggggggggggctctctccaagcaaggtttgtttctagccactctagagtctctgaaggacttgccccagcccctgtaccactaagtcccctctgctggatcatcccagtgaaatggaggtcatgcaagcagaggaagcaggtcctgtcctttgctctctggcttctagaaccacacatcaagccaaacctccagcccatcttatgtaagagttcccagggtgaatttctgctcactttagggcacgagaaatgggcatctctgatgagatctgtatagccaaggggcttctcaaagccgtcattttgaatgaggtcacatcttggatctaggaaataattagaagcctccccagcccaccaagggcacattgagcatctacccaccccagatcccagacccttcccagcattctgctcctaagaggtcatagagaggcctccctccagtccatttcatagaccccctcaagaatgaggaggagaagagaaagggttaaaaaaaaaaagccgaggcagcaaggcggtcatggggcctggactctcttctagggctgtcagtggaagaaagcacattccttcctctgagggcaaggtcctcatgcagaggtaagctgaagcagggccactcaagtgaacgagggtgtacaggacagacctgactcatctagcagccaagagaatagcaatgtacccagagcgagcaatgatgatggttcagagaagtcccctgccatgcaggcatcctttagagtttccagacaatatacctgggtcccagatccttgatttcctcagctgtaaagtgggagtagtggccatgggattgttgaggggacttagggttataagtccaagccctgtggagctgcacagaggaccttgtcaccactgtcactgtccttctgtggctgttatgattcccatgggaagaaaattcgcgccaactggatgggaaggctgtaggagagagtgcagccagggtgggtggcaaggggccacagatgccgacacaaacaatctgtttctcataaacatgggcacccacaccagccggccgccacccgcgacttgtacgagttgggaaagtgcgggtatgtttactctcactcccccgtgccagctggtatgctgggcacagcttcactcccagctgcctcgacagccggcagctcccagctcagggaggggagtgtgagcaggggcccctggatcttgcctacagtttggttcacctcgggcttgcgtcgctgatattttcccaagacaaaagtggaagacagggtgctgagagtctccttggcagtcggtcacatgactaggctgggtcagagctgggtttctggtttttaaagctccatctggggcttcaaggtacccctgtattgagtttaaacaacaggtgcccctccagtggggtctgaatccactccttctatacctcagctaccttcttggcatctcagcaccctccagacagaaaggtgcatgctgcaataggtgctctgttgttgcaataggtacaataggtgtatgcatgggctctgctgttgaacccatgtcctgcggatgctgaaggatgtgtgtttcgggttctctgctctgtgagcatcatctagacggtgttattggcagaaagacatatctgctgaacccttgaggttgggcagatatccactgtgaggtatccccatgtcactgcatcacatacctccaggcccaatggagagttttgagtcaaagaatggtgggaacttggaggtaagggctcagggatgctacccaggacctccttagcaagcattaagtggcccatactagagttattgcttgtgaccttggatttgggtcatgagtggctttggccaattagaatttggtcttgaagctgggccatgatggctctcacctttaatcccagcacacaggaggcagaagtaggcagatctctataagtttgagaccaacctggtctataagagcaagttccaggatagccaaggctacacaaagaaaccctgtcttgaaaaatctagaaaaaaaaagaaagaatttggtattgaaatacactaaggtctactctcaccctattcctcaaggaccgggccatttgggagggtttgttatcttttaagtagagcagccatacttcctctctcagttctggagagatagctaggtggttaagagtacttgttgttctttcagaggacctgagttcaatttccagcacccacatgacagtttacaatcatctgcagctctggttccagagtatcactctcttctggcctctgtgggcaccagacacacacatggtacacagacatacatgtaagtaaaacacatacacataaaacaaaactaaatatttttccctcaagtttctttcatcctttgcctgtcccagaacatcccctcggtacaaagagagccaggatgtaggtaaaatttagtcacacacttgagtatcacataggcatatggccatgggagtatgttatctaattatagtagcctggagccaagccaccatgttgggtgactctattcgatcctttagcctccttgacagccaggcttgcattagtttcagtgacagggaacatgttactctctaagcaatgaatgcttccaggatttgggaatcttggattgtaagaaagttcctttaattttcctggggtgagatgggttcctctgttctcagtaaccctaggaacactggagaaaggacctctcattttggaactcggtggtggaagccaagacttttgccacatgagattcaggccacagtagacaatcaagtttaccaagactttaaagtcatagtaagactggtaggactgaaagggtggtcaatgtctacaatcacaggacttgggagtctaaagtaacaagaccaggagtttgagggcagcctgtgctacaaagtagcaaggatactgtctcaaaaaagaaacaaactgaaaataaatccctgtcaaaatccagacttgtttcgaaaagcaaaaacagggccacacccaggaataggctctgcttcctctatccatgtgtagggtaggtcaaggagagggactttcctaaagccactttagggacatttcctcagactggcccaggctgggatgatttttttttccggtttattgttttgtgttggattttgtgtcttttgaaaaacaagagattgagcctttttatgacatggattttacagcttaacgaggcagcgtaatttcccattctcagcggcaagtgcactttttacactaattgcataattagacataatgtactaattgcagtaatggatgacagtcaactaaactttaactttaaaaacagggaggcgttgctgggggtggttggagggactttatcccccctccttgagttttgtgaaggagatggggagcttacctatgaaaggtcttagcagctgcctcttagggcccaaaccagagagcctctgggcccttctcccctgcccgggctcacggaagagtatgccaccaatgtggtgtgccccctcgggaatgtgggctgtgcaggtagggcagggccaagaaaggcatcacctgtggcagaaagccctcccctgtgtgcaagactggattgtaatggcctggctgcatctgcctgtgatgtcctctagacagtgtccccaggcaatctctactcacttgttagcagcgtaacaaccaatgtcacagtatacaagccctgattgtgacaatacaccgtgtatggctgacccaccatggaaccaacccaccatggaatggtggcagttaacagttgtgagcctgttagttaggaagtctggtgagtggcgcaggctggtgcccagacactgactgtgtattgggggctccagtggctccttgcccttgcctgagtgtaagttctgtccctggcaagtgaagctgcctggagagttctcagtcacagacacaatctagtcagaacaccctgcattagggctttcatgttcctaatgtgggggaccctcttagtcccaataagatgaggcctgtaccagatctgtcttaggtgattacgtgggaaagaactccaggtgcgtggccgtgcatctctcttcccagtcaatggtgattagtgggatgtcctgactcttgatgaggataggatcttggttaagcagcctactgggggtgaggtcaggggcttcactctggctctggtcttaaactggtcactgcctgctctccactcttctaacctacttgctggtcttgggctatcttttttttttaagatttatttattttatgtttatgagtaccctgtagctataaggatggttgtgaaccttcatgtggttgttgggaattgaatttaggacctccagcccaaatatttatttactatcataaataagtacactattactgtcttcagacacaccagaagagggcgtcagatctcattacaggtggttgtgagccaccatatgattgctgggatttgaactcaggaccttcgaaagagcagtcagtgagtgctcttacccactgagtcttcttgccagcccagtcttgggctatctgtgaccctcactttcagtttccctaatgtctagcacagcccagcctggcagtcaacaccgatccttggtggccaactccaggagcctcttccataggagtgttagctctgccatttacagtccatttcctgccctctccattaggaacatggaagcttgaggggctgggtagttaagacacccaccgtggctgtcagagatgtggtaagagaaggtttagggaacggctgctcacctggggagagcaggctctgagtgggggctgggaggctggagcacctggctgggccccacgctgagcctgagcctttgaggagacaaacagaagcgaggcaagcctgcatcaaatctttcttgttccattttctctctgatttaattttccagagattagggcccgttcaccttcactgcggagaagcctcaagagtgtgcctgtttttactcccagggttatgtggttggttagaggatccagctaagtctgccagtcctccgccccctcccctctggagtggctggcttccccctgccccagctcttcagtatcatcaccatcttgtctgccccaagctcctttctggttggtcaaactccccagttcatctcttcaaacccttatgccccctttctcaaaagtcttaccttcaagtttagagatggatgcagaggccagaactgtgaagcaccccaaggcaagggctttggatcagatgagccccgttctgttcctagctcttccatgagcttcattcccttctctttggctgttgaatggggatgacaagaatggactgtcttccaggggccatcgtgaatcggtgaggccaagcatgcaaagcacctgccccagagtaagccaatgggacaccttctatgacctcctccctttcctctcttttccctcctccctctccctcctcctttctctccctcctcaaccttctcaccctgggcaggttagtagctggctcaggcctaggcgccccccccccacgctgttgccagctttctgggactttatatagtacccctgatggggtctgtccatgatacttgtcctgaggtcttttgtcgcctgtggcagctttttgaatgtccctggcgtttggggatgaggctgactctttctgtcctgcgggtgttcaagtttcccatccaagggtctacaggttcacttcttgtttatgtagctgccctgggaagcaagaggttgagcagagggtttggaacccctaaagggaccacagagctagcatgagtgccctcaagggaagaaggtagccctactgagtcacgactacaggtaggaactgagacgatgtctcataagcacaagcatctgaagtgaaactctagcaccttcgtaaacactggggacacttgtagagatgggaggacccctgggacttgctggccagccagtctatagtcaaatcagtgagctccaggttcagtgagagacatcccccacctccacatgaggtggagagtcactgaaggtgccacctggtgttggcctctggcctccacatgcacacacctacacatttttaaaaatagtggtttgaaagtacatggtaaaggatggtagaggctcatgatatgagggactccgtacaaccccataaattgttccttctgccttaaccgtccctgctgttcctcaggccctctgccactgtctccttccctcccccacgtgcctacatgactctgtctgcctccctgttccagcatctttcttccatcccctgtggggtgaagtctctttgctctactaacatggatggcttagagttgcagcagcttgggtacccactggtgcctttgttcaaatcaaaccagctatctggataaaggtgaggaccactgaggcagcgttgccatgggaactattacgtgtggttttttttccaaataactctctgggacaaggaaaccagcaggcatgtggtcttgctgtgactgaggccttgcaccttgtgccctggcctttctgccatgtcccagttggtcccaagactaggggttggtgttggtgggaaactagctagcaggatccaagcgccacactttctctggtctccctcctgggtccatgctggaaatcagctccctggaccacatcaatgtggagatgacctatctcctggggaggggcacctgctgcactgtcatttggatctcccttgggctcaggaccaagctcagagcccttccagggaacagagcagctggaacaggcccaaaggaatgttggaagtgtgagacaccaggggcctgccattcaggagtccctacagggcttcatttgggaatgggagctgactgggctggcagcttgaacagccactaggattctgtcttcattacaccaaaaaccccttacaatccatttcctcactctaggcaggatttagagctcataggaagacagatcaatcgggagagcatggcttcgaggcctgctagcaatagtccaaagaagcctcaaatgcagccaccagggcaagcggcaaaaggaccctgtgataggtccttggcaagaagtggagcaggaagagagcctggcagaggcatgcagggatgaaacccatgtcccaaagctctgctcttcaacatggaatcgggcatctgcctttgctgagtgtcctctgcacacagacatggtgcttggggggacagcagaagagctagctgtctctgtgtgctatcagtggctccctggtgtctgggctcctctgttatcacctccagggccgagagtgaggtgttagggaaaaggacagggtggctgagggagagagttgagggtgtggggccggacttgggtaaaactcaggagaaggaggttggctagccaggaatgaaagctgatgtctttcgaaagctctcagcgggcatatctagcagaagagtgggggcagggtgggggctgaaactactctcagccttggtgatagtaaaggcaagggcacagggttccaaagacatgaactgggctgttgttcgttggcttgcaaggactcccatcctcacacatatatcaaacactggggattcagaaacggtgacttcaggagaacctcagactcccagctctgtgtcacctgttgggaccttggagtgtggccctgacaccagatcttttctggctactggatccaacccagtagtcacgtagacttcaaagtgtatcctaagccctagaaaggggttcccaggcttttcaaaaagacgtgcagtctttgggaaacctgcgcagtccagcctcagagcctaggaatgaccttgacaagcgaatctaatgtgttggaacgtcatcccttggccctgacaagccaggcagctgcgccccctgctggcacagatcggctgggtgctgcttcaactgtgtagcccagaccgcagtattaatacaaccagactatgctccaaagcatggaatggggtgtgtgtgtgtgtgtgagatgttaaacctccaaacctgagatgaatatatcaagggaggatagagcatgtggctttgtcactcagtcctttgtccagaattgtgttcttttgtctgattcttggtcctcctaacaggattctctgcttgcctttcctttggtcccctgagggccttggtccagaggctgagcaagggttctatgggacaacctgccctggtgtccactcagcacctcagtcctccctggctgcacaatccggcctgccactcacccccctaattgccacagctctgtaggaaggagcgacttcatacaaattattttgttctaagagaaggacaaaaagaaaagaaagcagagagagagagagagagagatggggatggcgggagaagattgcctgagcctgctttctgtggtgccttaacccttgcactgccaggcactaggcagtcagcagagctgaagctctggcagcaccgagcctccagcccttcctcctgtcagatggcagcgtccttatctctgcacgtcttctgtcactctcgaccgtatcgctccctgcctgcctgtctctcatcaggtgcctctgtcacctccttatggtcccctcaccacaagttcttcctgtctccccatgcccccacttctgcacagcctggtgtcgaggctctgtcagggtagccgggcttatggcctctactggtgaaggtaccagcttagggtacagacttcctggaattgtttgaatgggggcacagaccagaccaggcttggagacactctcaggggtagaacgcatgcgtatgcatgcacataccccagaccccgagcatgaacaaagatgtctgcagaaatctgctgctgggattcacatacaggctcccaggctacagctagaggacccagccacacccagccccaagcccacacgctggcatgtgcacacagatggcaatatcaagccatgtcacatactaaccatcaatttacaccaacacatgcgtgtgtactgagaccgcgcctcctaaggaggaggaatgggcagattaattctccctacccggtctccatcaatattctgtgccttgaatggcagaggagccctgggggctcctagaactctccgtagtttctgcaaatagcccagggcagcccccgcaagaggagcacagctgcctgaggctatgtgcgagagtagctgtgagtatgcacacgtgagagatacgttcgcggagatgtacatatatgtgtgtgtgtaggtgtgagagcatcctcatgtggggatgtggtttataatatatgctttgcggctccccctcactcaccacacaccccgccttctgcctcccatccggcctgctcttccctgccgctgctcatagcacacagggggttgcaagtcatgacccctgaggcccagacaaggcaaacttcccatcaaccaccagcactagccaccaactagcctatacactggaccctcagcccagatgtaagctatagagcccaggcctgcattcccctcccctgagatcatgaaggccctggattctgtgcttgttggggccaaaaccaatgtcctccagggataagggctgaactgaggtatgcatacagcgagtagatgagaccgtggcgtgggagcgatggaccattctggcctcacctttaacctctgcttccttctagatctacaaggacaatcggaacctgtttgaagtgcaggagaatgaaccacagaaattggtggagaaagtggcaggggacatcgagagcctgctggacaggaaggtccaggccctgaaggtaggccagtgtgttgggagcttgagaacattaagagaaggcagggtggagtggccttgactgaaggcagtgctccaatcctcgctctcacagagcactcgactccctgaattccagcaggagaatcagcagcaggcagtgctgtggggctgtgggcagccgtgactgctgtaattgggtttggctgcatgcaaagtgacctggcagacctaggctgtcctgcctctccctcccgcagggcctggagttttctcattcctcttggtcccctgcttgtctgtggagggtggagtgagtaccaggtcagaacagtggcttgttggtcgagtctgccactaggtgggctgcaggatctggtggggagggggagggcacagaggcagccacagacaggggaaggctggagcccctgctctgcccagatcttaaatatttctctgcctgttccgggcctctgtcttcccatttgtactcagagaggtagcagctcacaggccctgggttttcatgagtagtaagacctgccaggttagcctgataaagcaatcagagcccctgctcactccaaggacagcaggtggggagggccctcaggagctacagagacattcagaaatgggcaagaggcatccattctgcccatagatcagcagcccatgtagaagatagcaatgtctggttgaaaggaaagaaggaaggaagggagagaagcagggagggagggagaaaggaaggcaggaataaatattttgatgtgctctacaacatggataaactcaaatgaatcccaccaagtgaaagaagccagtgaccaaggccacgtatgtgatcccatttcaatgaagtatccagcaaaggcaaacacataaaaatgggaaactagcttactgattgccacgggctagtggggaggagacactgctggtgaatacagggtttcttttgatggtaatgaaaatttctaaatttagattatggtggtagtttgcatgactctaattatactaagaaccactgaaatgcgtgtttaatctgactggatttgctgtcaattaaatctcaataaagcactttaaaaaaaattagtacatccatccacaactatggccagggtcaaggcaagacaactcacctagatccttcatatctagacccgatggagaatgagtctccttttccagtagctggaccctgctgtccctcacaagctcctttgtcttaagtggcctatgtgtatggaagagagtagtggggctgacctctgagtctagaaaaaaaaaatggtttctaaggatctccctatgattatgaacccagcaaaccctgagccgtgcctaaaaagcctagtctcatctgatttgggggacctcctggtcacagatatggggagtcagttggaatgcaggctgtcacagaaggggtcaaaggtctctacctacgagtgtcaagccatgtcaagtctacccagccagcacaccatccccaccccctgcctctcccgaatgtgtcccctctcatcctgttctgtctccttgcccctcactcatcccagcccctgagtttacacattgcttcctaggtttcctgccccttcccaagttacggaacatggttgccttgttcaaacttctattttagataagtatttcgtacgtagcccaggctggccccaaccttccagtcttcctaccccgtgcctcatgagctgcgattatgaacatatacttccaaaactggcttgccagcccaattagagtccttccctacccccttaacccaatactacaggaacagccaaccctaacaacagacgaggttggggcatggtcagggacctctcttttcctgtaccccacatactcatccctggctgagagacaagacaggtacctgcctcctctcctctgagtcaggagcaccagcccagtccccggtactcagtcaatgacaaatacaaaatgattttcagcggaaggatgatggggcaaggcgctcaccacttgctcagcctatcatgagccattctcttggcacttcccatgggaaatctgtgctactccatcttcgagaaggagacatgaggcttgcacgtgtcatgtatcaggacaggatgcaagagaaccagaatttgaactcagggcttcctgactcggatcccagtctgtggcttccccactttcctgaggcattcattaaggctacaaccctggctgtcccagccctgtcctggccagtgtgttcctactacagcctgattctaggattactctatatccccagagaacagaagggctgcccattgccttggttctaattgttcaaagtcagctttgaacttgattatgttttaaatttgcttttaatcaagttctggtccttttcttcttttccacatttgtatgcagcctggacgcaaatgagaggaggagtttgggggtcttgaccctcctcccctattccattgttcctccctccctggacccccatccagtaatccaatttaaaaatcccttgatccagtcttgaatcttaagttggggcttgcaaagagagaactgagcaatgccggccacaaatattgtccaatcagcatcgagcagatgtctcttgacctgaagtcaagagtcggctagaaacgggccagatcagggccttgcaaacacagacgagcagtgtccccaggtccaggaaccatgctgatctttctgcttggagaacctgtcttgaaaccttaactacccaaagagatgaggcctttgagtcagggctttctaggctcttgagtcccagaaggcacaagaaggtgcctgggttcctgtgacacgccgtgagaacttgggcagagttgaagtacaattgtaaggtccccatcctctcaactgaagatttggaatacagcctctcttggaaaggttatttattcattattgtccccctcccctctctactcaatgctgtcaccaacgttcacttgtggccagttatgtggtaatctctgtgctggtgctgaaggcacagtagggaaggacatctccctgccctcatgtgcccatgcctttctatctcagaccccagctcccttctctgtgccactcgtgcgtgttactcaggaggctatggtaagaggattgcttgagtcccagagtacagaatcacttgtcaacatcaagaggccatgtctcagaaacatacattaaatcaagggcttggaagggcttgaggctcctccctgtccagtacctctgggtccccaactccaggggctgtcgttcacaaaggacagcaagtatccttgagtactatgttaccacccatccctggcacctttgctatgtggctcagaggagagggtttggatgaagtgagagacaagcccatagataaagctaaaggactgtggctcactggttctcagagaatgggaaggccagggccagggcccttgggacatggtacctaactcaaagatgttactgtacacatcagagtggaaacctgcatcctgctccaggaagtcttttgcctttgccttccaactcagacaagccgggggcaggggccttgctgggactcccgaacctagaaactcaggccacacaaactggcagtaccttcatatgtgccaccattttatggccatgtggccttagccatctacaaaaggccaggactaaggacaaagaagatgaggcattggcttcctctgacaaggccgtgacctgtgatgacctagtgaccctggacaaatctccaccccctcactttctttcttagacaataagtgttccttccaaagtcccctacaaggatcacgtgggtggggcagagagaaatgcagcccttggatctgagggttccagtgggcagcacccccgccatcagtggcctctggagaattagcgtcatttaaagagtaaaattaaaaacccttctgtgcgcagtcgccctgcttttgccgctaatggccacttaacccaattaagctgacgcacgttggcagtgtggccgggtctgttcaggaatggagctccgagctgggtgttcaaaggctggaggtaaagggcaagggctcagggagaggctactctctctgtcaggaagaaaaggttcctcccagttttgactccattgccgcttcctttctaaagctgtgtctaaagcagagcctcccagcaccagaggcatcttgaactagatcagcccttgcagtggggcctgctccgagccctggagggtgtttggtagcatccttgccctctacccactagatgccagtagcataccgctctaacagttgtgtctccaaggatagtctactggtcagaggcataagcgatgtgacagtgatgaatacaagtcccacagagagtgggacagcggggacctgagagatgtgcagatgccatagggcagtttcagcaagaggaagatttcctttcttctaaaagggcaatcgggaagattgcctggaagaggcagcaaggggatgatggttgggtactgaggcagctggaggccagttcagctagatccagtggggcagtcattgatgggggttcaacaaataggttggtcctggggaattcaggccaagagtcatccacctggcctctagtagaagctttgcaaacatttgtgaaacagatttgtgtttccgggttctgctggagctcagcttctggggtcatggttccgggttctgctggagctcggcttctcaggtcaaactccagttctgggaagctgaaactggcacagtaatggcgggctgacagacaagggagtctgtagcacccgctgcctccgcccaccccttctccgagcaattaaaaggtgtttatgtggggctggcagtggcttctgcctcccttccattacgaacattaagagatcttgacccttccactttccccgctcttgaaaggagctgcagacacgtggagccaattaggcgcacgcgtgggcgccaagggcctgagcagctttttctccctgattgcggcgtttacagctgattattctcccctcacccaaacagtgctgcttcctggcaaggtgccacccagaggagccagctgggggcccctggggacaggggaggactggattagtaaatgggcatctatcgaatggctttcatatgtgtggctggaagggagaagggtagggccaggaatggtggcagcaagggcccaggtagcaatgagggttcttctaacccaccatttagggatagcgatcagaaaagggccctcagaggaggtgacctaaatgtgtgtagaagctgacagccactacacacacacacacacacacatacacaagcatccttgtccttggagtcggtcagcatgagcaagagaaagatgttcccagtggccatgagagtggagccctcctccctacttacatccaggttggatggccaggagatcctgagatccttcaagactccatgctgccctggtggagccaagagctagtctccccgggttgttagaaggaccatgcaggtctagtatggctataccccagccaagggtcctccagggtctcttcgttgccttggcctttacctgcccagttgactcagacctatcaggccttcggaaatgccaggttgtccgtttggatctggtcccctcgggactcaagtggcctttgtgcagcagtctgctcacctgggacctgcagagacgagggccactgccatgcttcagcatctgctaatcaaaggaaggggttgatggttggggtnnnnnnnnnnnnnnnnnnnnnnnnnnnnnnnnnnnnnnnnnnnnnnnnnnnnnnnnnnnnnnnnnnnnnnnnnnnnnnnnnnnnnnnnnnnnnnnnnnnnnnnnnnnnnnnnnnnnnnnnnnnnnnnnnnnnnnnnnnnnnnnnnnnnnnnnnnnnnggctagggccaaatggaggaaatgacaccagacactctattccactcactagacaaggcctatgcttaggggaagactcccatctacttgggcccacacctctgagacgggtgggggtagggagtcctagctggcaaacggacagatcctaggaggtagagggaaaggacctacaggtgccacagggacgaaccagactaatttaggatcacagaagtgagaaatttaattgatttttaatagcatgtggccctttgttctgaaattattgtgtgacagtgctggggagggtagcagtgtgccagcagggctgatcctggccctctgggccccagatttcaaggagacagacagtaacctttggggtgtcagtgtgcaggcttgctaccatgggactaagaagtctaagaggacagcctggaggaggtggcaatttaaactgagccctagaagacaggtgcaattgtcaaaggcaaaaaggagtatcccagtaatgtctagtccagcactgacccagtaaagaacatgagcagaaggtacagcctgtgcctcagtttctactgcagggaagaagcgatgtggcagaggtgaagcgcgggacaggactcagtgcctgatgtctggagtggttcatgtacatccttaagcatggtccgctttcccagcacgctctgggagcagtctcacctcacttttttgtttgtttgtttggttggtttggtttggtttgtttttcaagacagggtttctctgtgttaccctggttgtcctggaactcactctgtagaccaggctggcctcgaactcaggaatctgcctgcctctgcctcccaagtcctgggattaaaggcgtgcgccaccactgcccagcctcacctcactttctaagcctcaatctgtgcaataggcagcgcctccctggtgacagtgactacccttgggagaaagcactggtattaaagttggtgtcaccgccctgggggtggtagacacaggggcagtgagaagggcaggggactgtggcttatcatgtcacaggatacacggcgttgcaggcgcctggttcagcttctgtttactgagtactgaggacttgtcctgttgtgtgcaggcccagtcctaagtcaccaggaacacaggagtccagtcttctgacagtgacagtgttgtgatccgtgtcaccaagtatggaatgtggggctaaggaagcccaagggacccggggagaggaagatttagccagggagaaggaaggagaggaaggaaggaacacagaagttcagggaccagaagtcgactttcaaccccacccagtccgccctcactcttctggggctttgacaaggaacccctgttcccaacttgcatctctgtggctcccagtgtccaggctccgcactccttccctcctggcacaggctgtgggactggtgtttgggaggctggtcatagccgctggccctttgtagcatcctcctcgtgtttgcccactctgttcctcagtggatgggagttgtccagtgtttgccgtgtcaacaccagctggagtccagctctggagacatgaggctgcatcctcccgccgcccagggaccagggctccggcctttacctggcaggctcagggtccgtgagctaatggatgtcttttccattacacaactcatgcaggtccacaagaatgccaagtataatgaggcggagacctggagccaaggaaggcaggctgtcctgtacacaacttgggacttcaaggcatatgcagtcttcaaggccgtgaggctaagtccagggttccctagccctttgtgcagggtcccactgacttcccatgacgacaagacctttccttcctcctgtgtgtccccagtcaccagatccaaaagcctaaaagaggtctaagcagcaggcaagtgactagatgaatagacagacagtaatgaagaagcaagacgaggggcagagactccagaactccaggaggccaggaaagccaatgtccgtacaagagctgtctaagcccagcccagagggaatgagccgctgccccaggaagggtgccgaggcttgttctcagagacagatgggaacagaggaccagagagcaatggaggagtaggctttccagaagtgtcttggagatgacttgctgagaacagctcctctggggcaagaccaggtacctgggtaaagaggcaggtgaagtcgcaagtgcagccccaccgcattagccagcatcggggaatcctgccaggcggttcatttctctgcatagttctcttacctgtgagatgggtgtggtgagcccacaaagtgggtttcctgactgatcccctctgactgagactccacagaattgtgcctgtggagatgcctggagggagagtcttgtgggcttttctgaacttgcatttagagggctgatgagaaaggtctcctcacttcactttgagatccttcagaaaggtcccagtttcttagaagcacaaaaaagtggcactgagcccaaggctaaagaaaagaaggcagtttgtggagtctccaaatattaatccttggattcaccagaaacaaacaaacaaacaaaaacaattccaccattctgggctggatttgaagcaaactttattaaatattgaccaaaagatggactttggtcaggaccattccctggaattttccagctaagtggcaacaagacatgtgcaacaggagttataaacacaaacccataggctaccatactctcccatgaagctgctgttatgttccaaaaacaaacaaacaaacaaaacaaaacacaaaaaaaactacaactcacagcaccctgggaggttacctggtcctcgggcaggtggggcttataggataacttggggcattacatttgtccctcagagagcaggggaaagattctgaaagaggaaagagccttaggatagtagatgacccagctgagtccagtacgacttccttggaagagaggagcagagctaggtgcctgagctctaaagtgagtgggcagttagtctccaacacagaaagtggggcactcacgggaagtggggctactcgggggaaaagaaagatgatcataggtgtcaagagaggggttgaaggcctacagccttatgtggaagagggaggaaccttagaatcaagtggggcctcacgagtggattggctgcagtggggcagggaggtaggagcctgggacacttcctggggctgacatgtaaaaggtaggagcgtgggctgcatggtgagaccttcctcaagtgcccgctggtctcctcaccaagaggcaagcctggagcttatggggtgtagcagtcgggctttcatgggcaaggggtggtgagagcatagactctcaaatcccagggtcttgtgtaacttcacagtgaatgcatacagtcttgcctgaagttcacagggccagcagccctcctgacccccagagctgggggacctcagggtcctgcttctagccagtttttagataggctctagggtcctagcaacttggagagagttggagccaggaggtctatggactgtagagacaacccagattcgtgactatggtctaattcaggaggccattgctcccgttctccaagcctcaggcaggaataccaagttccacaatatcccaatgacaccgaccttttccttccattggcctgcacacctgggcttccttttatccaaggttcctctgctaacctcatctctctgtgtgactaccatgtaattagttcatttcgtaaactattacatctgtcatattttctgttcacctttttctcttccaggaaagggtggaaagggttagggtagagagagacttctgggtgtaggaacatctcataggtcagctttgcctccctccccccacaagcagtgacaccctccccccttaatacattccagccccagcctgctaagtaaacggaaatcagtgaatcgagctgaagatgtcagagctcaactcatgccaggaaaaagggactgcacagacctcatagagtctcttcccaagagaatttgcctgttttattcccacccaggcactgtccaactgcagggctcagactagtaaaatgcatggtggtgttgcccactcaggatgcagcatgtgagagatgagggtgtggcaggcaaggtggatggaagtaggcagaggtgacagttgaaccctcaggcaggggctgcttggagccatcgactacggacaggttacccttagaattccacagtgggtggcatgcacctaggcccttagccaaacatgacatctccagaccagcctcattgtcctgggatcagaaatgtctgaggctaggcagagggaacagtttaagacctcagtttaagctgattggtttttaatattgttttgaaacagggtcatcctaggtagcccaggctggcctccagttggtgatctttgtgcctcagcctcctgagtgttagtaatatgtatgtgccatcatgaccggctttaagcttttaatcagaactgtctcaggccagcgatcagagccaagcccttccctgactaaggctgcgctgcacagggcccaagcccactgaagctgtgcaatgcacaaggcaactggaagaactggttggagctttagctggcatggcctacttttctgctccctgcccaccccttgtctccccgccttttcttgctgtgattccctcgggatgtgaatccttttaaacttttaattaaaaacattctcttttctcccttcaagggttacttccccatgacttccctcttagaagatagaatgggggggaaggcaaggagtggaggtcaggactgtctgggtctcctcgggtgggtcctgggaaccaagccctagccctgaggaggctgccccgcccctcaccatagcttctcaattctgccagggaaataatttccagtcacgttcagtgtgaagcttctggagtccttgtgtgtgccaccactccgtcctgtatagacattcagggacacagcatgtgcccattaaacaggccgggacttccctgagtaaaggggccacctgcttctccgtgaaggtgctgttggcttggtggcctcagggtcatatgtgagtccatggcttgcaaactaaggaagtacccaccaagcaagttacagctcaggactgataccaggaatctcaaggtcaccagtgaggtcaccacagcatcacatgtcaaattcccaagttagagctcaggggcacattatcagatcttggctcacaagatcaaggccccggggatgctgaagattcaggttcatgacatcagggaaccaaaacagaatctttaatcactagactggagggggctggtccagctctttctccgggcaagtgacctgttagtctatgctgactctagagggaggtgccaccatgtctccagatccctgcttcacagttagaattgtttaaaagttcttccttgggtcaaaccatgattgcacttgctgaaccctaaccggttccttggccccatctctagagaattttggtatagatactctctcccaaaagctctccctatcccaggaaatggaattgagtctccacccccatactcctagtactcctccacacctctgcagtttgagtgagtcatgaactcacaaatttacccagggatatccaggtattaccctgagatgttcccagtaggttctttgtctctttgccctcaaggcagaggccctccccacataggtccccagatgcctagaaactccaaattcaagccaggcaggccccagccatgagaggaacagaggaattatcaaaggttggaatgcctttaggggacccctttcttccccctccctcctctactcccatctgaagcaatagcaatagtcaaagccatgaggtcccagagaagggtctgagatggaggtatcagccctatggagctatgaaatcatgcgcacacacacactcacatatacacactcactcacacacacacactcacacacatacacactcacacacacacacactcactcactcacttgccttctaggctgccctcgatatccctcctgagacacactgcatgcctcctgcttagcagacccctgagagcacctcacctcacctgtgagtgaatgctaaaggggatatctccacagtaatagggaattaaagaaacccgggggccatttaggaaaggcagaaagcaagcacggcagcaaacgcctgctataccagaccgtgaaaggtaaaagccgaacagttagaagttcaaagtcatcctcaagaatatggtgagccggaggctagcctgagctatttatttactaataaataaatgaacaggagctagggagatagctcagttggcacagcaagcatgagcacctacgttaaggaccctggagcccatgtcaaaggccaagcaaggcggcacacacctgtaaccctgcagtaggaaggtggaggcaggaggatcagtaaagcttgctggtcaaccagtctagccaataggtgggctaaaggtctaataagagaccttatctcgaaaaataagacaagagacccaaccatagcttcaggaaggacaaagaggagccaggtcccagctgacttggggaaatctggtctaaggctggggctgtagcacagcctagtgtgtgtgaggtcctccgttcagtctccaccactggggtgggggcggggggactggttcagagtgagctgtagccatagcagggacaagggtgcaaaacgagggtgactgagctgaagaggcccagggatgagatggagaggaatggcattctgggcagaaggaatggtccattcgaaaggataaggatatcaaaatgtatcccagtacacagacagtcagtgccccctgtctcatacacgtctaggcagccaagtcccttctatccatccaatcatttgtttattttttcttaagatgtatttatttcatttatatgagtacactgtagctgttttcagacacaccagaagagggcatcagatccaattacagatggttatgaaccaccatgtggttactgagaattgaactcaggacctctagaaacagcagttggtgctcttaaccactgagccatctctccagccctcatttgtttatttaagaagaaatagtaactgggcattgagaccactgtgattgaaaagagggggagaaatacccctgcttctcacagaaggcaggaaagatggcagaacaaaaagctaagtcctgtgagagcttgctagcatgcaggcacctcacaagccctgagcggaggtacaatggagacacgtagagccctgagagggtctagcaaggtctgggccctgtccccagcttgtcattatttggtgtttggtagctcactttcagaggttctcgtacatgggaaggcccatgacaatccaggtgtataccgttcattataaaaatggtataactgcagccctggacctagaactcaagtctctggtgctcctgtaacaggagtataattctattggcaaggcttttccatatccaaatccaaccttgaagaggctcctgccgctctgcacagcgctccctacagcccaaaggttgaattgcaggcctgagaggttccttttggggtagagccagccctggctagacaccctgaaatggagatccagggcatcctccggtcctccatggaccccccatagagtggcaacatgattcctagcttgtctgtcatactgggcagctgtgaaagtggagagtgccggctcctctgccctgtgctctttctgttcaggggggcatagagcctgcctaccttgtgtggtggaccagtggcaggctttccctcctcctcagtggccctgaggccatccgtcacttacaaattctcttcatttctaaataaaatgatttgttaatttgagtgagtgatcgccactcgtccaagcctctttgcaggcccaggaacagcttgtgggctcccggagccccgcgccgcaggcctggcgcagacttgcaggggttgttttcgatttaaatgtgaattgaatgaggagaaaaatgtttctcttggcaattccataggagctcgctcttctgacagatgttggagtttattatcccatcgggcttgcgttttgtcgagcagaattgctaattatttcagaggcccggccacagccaaagaaggaaagaaggtggcgggcgtggctttgggcggagtctgttgacgggcaggtgctgagacaagaggccccagcgggccctccttggatctgcagacatttttggattaagacctggcctgcccacccctaggtttctgtaatgtgtggtagtctggcggagcagcaaggccttttgtgtccgcaccgctttgaccttatagcaaagactccagaaggtcacatttgggatacgaactgcttgtgtttagtgggttcacgggtggcgggcggggggtgggtgtgcgggggcacatatctttggaaccacagctctgtgcaggtctgcgggaatttagtgtgcctgagtgctgtttcaagtcacacagtctggtgtggttttgtgaatctgatatatatctgtggggcatgggcctcaaggtgtactgctgctgctattgcaaggggaaggaagccttggaagacagcaaggcatagaggactagacctcagaaggaacgggccagtaacggccatggcaccattcagatgctgcccgagaacaccagagtccagtgagggaaattgaattaggaggtggctttacgactctggtccatttcgaatctgggcctgaacctcaactgtgactgcacacgaccagggtctgaatcttctgaattgtctcttacgatggtggaatgggggtgtggcagttcccctctgacactaggagtgggggcttggcagttgctttcagtagcctctgtaaacagccctttcctccgcccctctcccaggccctcccccagccaccatcctgcacctccagacaataggctgggtgtgctgcccatcccagctctgccagctcagggattcgacccggtccccaccaggtccttaccctcttcccaccccctaccctgaagctccggccaactaaagctcagcttcctgggtttaatgtaaaggcacccgcagctgggcgggattttataaccctaattaaccaaagattccctggggtctctggctctagaatcctggtgcaaactgagacctgcagagcacaaagggtccattgtggagtcaggtgaaggggaacagaaactcagcctttccctgctccacttctgggcccctggtagcccctcaatggaagacactagggaatggggaggggttcccagccaccctcaaacggagatcacaccaggcatttctgattgaccatgtgtccctgggaacacgcggtctctcctctgtataaagccccaccttgacatccttccattaaatagggcatgttcagaagagaaaattgctactattttcccctcttacttcactgtcatcaaaaattgatcccatattgcatccttatttcaaagaatgagctaaaaaaaaaataaaataaaaattcccactcctcagagcagcagctgcatcaagctttccaccccacccccaccccaccccacccccaccaaaaacagaaagaaagaaaaagaaaagggaacgtgacccattgcaggaagggtgcccactggccggctgaggctgccgagctgtcctgactttgggaagcacgggacctggaaaggctgggcactcagctgtgagggcagagaggggtttcgatctggtgaaatgcggtggagagtgggggggggggaatgggggaggttaatttggatctaaatggagcgactcgttatctcaataagaagcatctcgttttccagggagacggctgcgcctgccagatgctggcctgcctctgtctagtcggggtggtggctcggcacagggccctacagtcagtccaacctcacctcacccaccgcctctgctgcctggctggtgggggaaaggcgctttaattgggcctattcctcagttcatttggcagcacgtggagtggtttttcatatacaatatgaataataaagacggtgcaaaagggacgagataagaggctgggtccaggatcaggcacccggcctagctgagcagacaggctgtggcactgggccacctgaaagctaagggttttgtattttaaccagaggtcaagtcaggttcaggtcaattctcctgagagcctcatctaatttgcccaggggttaggggctcacaggatggtgatgcggtgtatagaaactagtggaagccctgtactatgagctctgtgaggttggggccagagcctacttaccttcttgtgtctccagcacccaacacacaccacaaatagtgtcggccgttagcagaaagaaggagaaccctcagggtcaccttttcatttgtccctcattgtggtgtttgtggcaacaagataacacaaaaaccaaggtgatcagacgctagggcgaaggccaggagggaggacaagcggtagacagatggaggttgcattggagaaggggacccctgggcccaagccaggaaaacccacttggctgcgcctcagtagcaagggctgagacctgtgtgtctaggacccagcgctaagtcaccccttcccctccatccccagaagaaaaccctatctcccagcaccttagaaatggtcaagcacacaaagatagttgttcggccaaacatgaagactcagataccatgtgggcatgcgtacatgggtgtatgctttcccgtgctcatacgtgtctacacacattcacatatgttcatacatgcacactacctctttctctaacccaaagcctatcacccccaggatggcaaagctgatggtcacagagtcagatgaaacctcgcccactctctactagccacaaacccaacatccccttgtatccctcaatagagagccaagagaccatagtcaccccctttcctgtggaggtggcctaggaagtaaggtagcagcgtaggactccagagtgttgggaaagaccttaccctgggagtgatctgggcaaagcaatgggctctgaatgaggtggcctggaggcctctacatgggctggattgtcatggcgagctcctagctccatgggttcaaagaagtgaagcagaccctaagatgagcatgacccaggccagcctttctgctctccctttgccttggtttttccttctcggaagtgggatgaagatgcggacagcatttttctacaagccctttacagatgtgcatggtaggcctatgctgcctgagcccatgactctactgtgttcctccagggggagccattgcaggcagtggcctctatcaggacagctgctgggggctggacaaatggctcagtggttaagagcattcgtggctcttctagacctgggttcagttctcagtcacatgactgctaacaactgtctgtaactccagttgcaggaaatcaaaggctctctttggctccggtgggtcctgcacccatgtgatacatagacatacatgcagacaaaacatgcagacatagaaaatacaaatgtaaaaagacagagccctggcagctgcttccaaagggtcagtgatcaacaactaaactatagcagtgcccccagtcccggtcccttgtgccacgagggtcccaagctatacctatcaacagagcactcttggaagaggtcttctggctgaccatgggcagaacacaacgctttatataccttctttagagccccttccccctgttttttataaagacatggtctcagtatgtagctctggctgtcctggaactcactatgtagactgggttggccttgctcctgcctctgcctctcaagtggtgggattaaaggtgtgtgcctctacacttggccttcagggtcctcttgctgcttccagtcttagtctagcctaggaaagagcttgggccactaagatgatctcctgccccttgagtctcttcccagatccacggtgtttccctattcatattactgacccatggccagctgaaaatccctttctgcctgagaggagcttcgtagtatctcttgagctaaccagcaagtagggtgagggatgtacccacacagcccctgggagaacccctgagctgtgactggagactgaggacttctgagccccagcttcatctgcacaatggggtgaggatggatctgctttgagggggggttagtgagcagccctgcggctcggtgatgtcatcacctgttgcagcacactgtggtgctgagtccgataggtatgttcttccaggtgcaggaattcctgaggccacgcccagcccctcactatgaaccccaagtgctgggattatcagcatgtggcttgacacccagctcctctgttttcttgtcagtacagtcaaaagtagatacttttattttcccattttacagggaaggaaaactgaggctcgaaaagctgaaatctctctggaggttctttctcaaacaaagtccaacccaaaaggctgaggaagcagaggctgagccagcctgatttaggagtctctcttccttaggtatggcatagtggggaactgactcgcagacccttgtcccagtggggaggggagctgaagtctgagtggaagcgggcatggtatagatgccctaaataggcaggaacatcctgcacggctaccccccccccactcaccctctccagctggtaccaaggctatgtggtggttgctaggcatctgaagggcccaggtggggcctacctgtcatggagcggctacgcagcatgaggtaggcacgaggcccaggcaggagcaaggccgcctctgcctgcccgccctcctctcacttggcagcagcacacagaagccattagcgcctggcagcccgtgtcccacagctctgacaaacgccttaaatgttgtcgccacggctccagctgtcccgccggccgcctttactcctcataataaccaagtgtcgtggctgattgcagcagcggggcgcagccagtattcagaacagcttttacactgggcgtttccacctggcaaccaggctgtgcccaccctgccttccacctccgggcctttgtctggttgtcacttttgccaaggctctcaacatgacccctgggcagctggtgcccagccttatgtccagggtagtacccacgttgcagccaccaaagctagcgggcagtctcaggcatccactcaaagccacatcctgggtggaaatatatggcttcaattcccactcttccggatgacctctgtggggagccctggcttcaccttggtccagcttcatcccttagcctcgctgccaggaaggcagtgaggtcagaggctggtgctggcgtggataaaggcatattctgggtagaactctgccattccatcgctgcatagtcttgggtaagtgactcacattctctgagtcttggtccccttgtctgtagaatgagaatactgactggggctcatagagctgagaggaaagattggggtagaagtaaggagctctgtggaagaggcgtggccatgccgtttagcagctggggcccaaatccttgggcagaacaaaggtctagctaagctgctcaccctgacctgcccccacgcatctccaagccacacctctgtccctgcagaagctcccacttgggacccctcccctctgtctgaccttgtccctcaggtatcatctgctgccctccttctcaaaaccatcccggcttaggctaatcacatcctcctcctgagagctactgttgcgctcaggtttctcctcattggctccttttaccttcatccagtcttgcatcaaactggtagaaggactgtcttagaggtgaggtcatccggacccagcagcatcagccacccacgccatgggtgagcaccctggtcccttctaaatggagccccaggttctgctgaaaccagggtgtgaactaagccccattctctccagggcctctacctgtgtgggtgaacacctgatctgagctgtagcgtggggtgcttccttcctggggcagcagagataagcatagtattcaggcccgctttgggttgaagacgaggtctctggtcactggatcactggggtcagtagcagtggtgttactcaccaggagacctgaagtgatagcaaaggcagccacagaggtgtagtagtggctggggcagtggtgacactggcagtaaaaggtggtaatgacgatgatggttatagtggatgataacggtgacagacagggatgaagttagcgatgagaatgctggtggtgatgggaaagataccagtaaagacgctgtaataagaaatggtggcggcagtcacgaaggtaatgttgaccgtgagtgtggtgatggtggtgttggtagcagggagcaactgtgaagacagaagtggagggttggtggaatggcagtgacacaggggagccggcaggggtccctggggggagtgttgagcagccttgacccattggtgagttgtggtccagatgacggcagaacacggtgggtgggggcgtgcctagttctctttttcttttaacctccccgagagcacagccttatgggtaatgagatgcaaattgacagaaaagacaatgagccagcctgcggccggtggggcagccttcagagtcagactgattgccttcgtgccaatttgcatggcattagctgtaggcatctctttcaataggctcgtgcactttaccagaggtcacctgtatggttacagtctacgagaggctgtgatcccagaccacaggaccagtgcagggccaccctgaccctaacctaaacaggactccatccagtatgggttccaaagggtcgaggactgtgggaaaatgcagtaaattaaggagcttcacagtcagccaaggaactgtctcacaagggctacacctagggttgctttggtcaatactatatgtccctctaagcatgaggcacagaaaggttacagaggccagaggtaggggagaaaactggccctggcctagcatgcctcagtatagacccaggttctgtccctcagtgccatggtggctggcagtccttccaggccttggctcctccagtgtgctgtggagccaatcggctccaacttcatggcctccacattaaaaatgatggtcatcccgcaaggccttctctgtggtgtgcttggcaaaagtggcctaggtccatatcacatgttgcatccctctgagtactatgtcactgtcacagtcactcaaggctctgcctgaggtctgcttggattgtgaacttagaaggacttaggtacagtgggtgtcaggtcagtagctaacccaaccctattggccacatgcccagctctagtccgtgcctctatccagggtactgaaagtttgctccaactgggccttaggtacctgcggcccttgctcagagccctctgatccagcataggcccagacttcaggccatgcctcttctcctttaacaggcagctatgggactggggctcttcccctctgcccttttgccctccgccctcagcccagccagagcccccttcggcacctcccaatgcctggccagccccgcctccctcttcactgtcccactccctctcctgaggttgggcctaatcagagctaatcagaaaattatgagctgcctgattactgattagatttctaatgttaatagagttgagaagggcctgctcaggctatgttttagggaaaagtataaaaataacatcgtgagaagagagcacggtggctgggtgagggctttcgttagggttggtggcccaggctcagcttcccgagaggaacactttccacagctcagggtctgcctagcaccctaagttctgccagtgagttttcaaacccaggcagttcttactgtaagggtcctctggcaagttctgtgtccagtccagctgggagaagttaggcgggaggtactgaaaaacttactgatgtgccatacaactgcggagccgcgctcacgggttcacatgggcctagcaccggccaagcatacaggaagtgctcatttagtgacaagagagccacattaatgtctttcctcaggagccaccacccttcaccttcaacccacgctgtgatctctcagtcactcccttgagccacagtgagtgttagagacatctagtagacattggggagtgttagggatgtgccaggaggatgtagcagtactgggtcagggtgtggggtgtctgcttcccagggattccatgatccccaagggctgaactcctgaactgatgaggtgtgcgtgacacgcacacactcagcttcagattccaacagaccccagtggctctccttcctgattcctcactgactcaacagcagcaagtgacctgatcatgtctagagtgaagttgggtcccagagagacaggatcaatcatcctgtctgcactgtgccaggtaacactgcgcttagactcagcctcttgccctgcccgcaccttcccttctgtgtcatcttggatctctgctctgtcatcagtgctactgtgacttggtatctgccatctttattccagagaaacccagagtctctgagtcaacagctctctagggaccctcccgatctacctctgaccccactgaccaccatagaagcctgcagtcactcagtacttctggctgagttgggccatgtctaggacggagactatataaattcacaaatcaagtccctgcccttaggataacatctgggatagaatcaaacacggtatactgtgatgtgagcccagaaagatctggagcctaccctagcagagaaccaggcttgctgaagggcattggtaaacaccaaaagaaatacaaagtgctgatggtttaggctcagggaccaacaaaacaagagtgtagaacctaagtgtaaaagagaggtgttcaaagtcgtctctgggagagtgaaaaggttacgacagccctattaaaaatggcaacagagccaggtggatctgtgagttcgaggtcatcctggcctacaaagtgagttccaggacagccagggcttcacaagaaaaccctcagttgggggaaaaatggtaacaggatctaataggatgacatatccctgcccatagtctcaactcaaggggcaggggcagaaaaatcacctggtttccatgctgaatttcagctatccagggccacatagcaagaccttatctcagagactacaaactaattaattagttagttagttagttagttagttagttagttagttagttaaaaatgcaacaggaaggaagtgtgatcagagtattcagaaaacactggtatagacataggggccaacatggtggcataggcctgtagagatggatgcatttatgccagacactttgggtatgggggtgtctaaagttaggtttgggggttctgggagtctgatcaaggtggaaaaagtcaacattgggatggccatcagtgccagttagagatcaggccagggtgttgggggataataaacaacactcaagaagatgacacataagagaggggcagtccattggcacaaggtgcagaagtcggatcaagccaaggctagacagtcaagtgcactgaggagtagaacggaacagtcatcaggaacaagggaaaggaaaagccaggacctggggtttgtgtccaaaatgaaaccatatcttccatccagacctattcagtccatgtccccacagcttctaagggctctggttcccattatacaggtgagaaactgagaccagagaagtgatagcaattgctgagtctcgggaacgcaggcctccagcatgggggacaggtgaggggagatgacattgtcacccacaggaacacacacagaaccctgcattgcctgtctcaaaatgtagcctgatgaaagggcaacatgcaccgatgtgctccttgggaaactcagataacgccatgcttccatgatagccctccctgacgctgtctgtgtggctcagtaaaggcagagagaagcatgggtgaatatactatgtcagagctcaaaggaagcaaatctgctaaacttactggacaatccccctgctcaccgtggaccagttcgcctggagagatatacgggggtcatgctgcggttgaggcagggcagagggtacaaaattggggcttctccttcattgacaccctcaaggggttagacatcatctcagactgagccccttcagtcttggcgtgcacgagactcagtcttagtgctgcttggtggaaagcacttacccacagtgaggatctgaagttggaagttggtacccaaactccaacctaaggccgtttattggatatagtggtttatttcttaccaggcaccctctaggggggggttaggggctagggttagggttagggttaaggttgggttannnnnnnnnnnnnnnnnnnncctaacacctaatcctctaacctagaggtaggtaaccttagggtacctagaggtagtacaatgacctggtgggtcaaggacctgtgagacactacacacaacacagacacacacacatacacacacacacacacacacacacacacacacacacacacacacacacacactgtccaagagcctgtgtggctatctaggtctacacccagccctcctaaggcagcccattgccagagtggaactcaggctgatcccaacagtatgtggtaagccacaggcctccctttcctcatcctgtggatagatttggctgccgtccagtgacacaacccactctttctgtgcggaccaaagttctcgttaaagctaaagcaatcaaacgggtggaactgatggccacctgtgggtacacttgcctcctccgcttgctcgctcgcttgctccctccctccctccctcggaagaagtgtcttcaagctaataactttcctcttcttagtgttaaaatgcaccctgcctctctctcaccctctccctctccctctccctccccccctttttctctcaacatacctgttacaagacaatgtggtattttgcatgtgtgtcttccctaggaacccagtctttaaggacccagtaattttctggggaaatttgtgtgttctgaaagtcacaccttggggacaccagatagggccatggtcttgcctccacccccgcccacaccccagaccacaccccgcccacaccccagaccacactttatgtctttccttttgttctggaaaattgaaacataaactgtctctcccagatggtacagagaagtgcgggaatcaatagccaagctggcatggcccacagggacctcgggggcctaggcaggagcagagaagcagcttcacacctgcagagagagagaccaccactctgatgagtttttccgtgttacatgtgttctgacctttttataggaaaacaaattcgctttactattttatattattttttagcaactcatgtcacgtgtgcgtggccagtgagggaaaaggttaggaaacctgtcactgtcaaccaccacaagcccctttcctgcagcacaggccatcctggggctgtttgccatttgcctgttttggttgctggaactagggtgaggggtttagggtttgttttccattgttctgatggcaattttatctttatgttggaagcagagttgggaatggatgaagggagggactgatgtgtcccagtcacaggacaggtaaggcatgggtctgactggcctgctctgcccaaactgacacacgttccctcatcccttgggattctataaagtagaagattgggacaagaaggtcatggtcagtgagttccacatgcaaagcgctgagccaggaaggcaccagcagtctatgtaccggacactgtccatttgtgcatgcccgctctcagacaacaagaggtgcagagattgatctgagctgggctttcttctactcccttactggggtgcttagatggacacaccactgcctattcaagacagggtggcagggaggagaagtgcctggtgcccagctccccagctcagcctccacgtctactcctattgtcagccctgggtctccaaccccctcggtgctgagctgcgtcttgcttcattattatgcagatattttaattatgcagatatgtttttagacagttttaaatatgtatattatttactcattagaccataacagctctggaaattggaaatctgtatttagtatctagcagtgcacaatatggatctaatgtgggggcctcagggaaggagacaacaggagacggctgggctgggcgaggctactcggtggggctgctgggcataccatcatcaggacaggacccagggacaccaagattagttggtaaactctggacacttcttagggaccattttactggtcctcctcttggataaaggacaagggaaccacttagggaacagcaggtaagccaagccagccaagcccacctggcctgatcagcccctgccctgaggggcctatagtccaaccctcctgggctgtggcattaggtagacctgaagatgtctcctgcaccgctccctgaccagaggaaggtctgtggcagtggcactaatactctgcctcagtcccctcggccacaaaagaatcccgtcttaggcaccctgcaatcctccatctggcctataaactgcattagtctgtgaagccttggcctaggtaggtgctgggcatgtctaatgctagctaggctgtgactgcaaacactctgacagccctcctatggtttctcagagcatctctctggtgctaccactctgttctggacctactggccctggcctctacctcagagctcctctctccatcccagctcccacgtggctcatccccacccaccccctggaccccagagctcaacatttggctcatcacaagttccctctaagcctctcagatcctcttggaagcagcagtagcagtaactaattaaaacccaaaactctctaaaacctttccctcctggctatgcaattgaacaagtcctgtttgatgggcagttgcttccagagccttctgccaccagttctgatttgaggggctcccggatgagagaggatagaaaaggcaagaagcggggtgctgtgggcagggtttttagagggtgagccacctgagggctcttcctccttactattcccaagcccagtccagcccaggatgtagggactccaaccctccaggtgttgtccatggcctgggtcccttatctcacaccatcgtctgtctcagtccccctaagctaaagacgtttaacttactgaaatttgaaggtaccggtggcccactgctccccaggagagtattgtccccagcccagcgcacagcctgtccccttctttcttgccttttcttgcaagaatagctcccagagctcagggaaattgattgttaagtgaaactctctgataattgcctctgaaatgcctgctgttatcgtgatggacttggctgtgaacagccctcctcagaatcccactgcggttccctccattgctgaccatggtggggacaccacaggccaggcaagacaccatcaccagcttcacagtagcagcatggccctagggaccccttaccctgcagggtgtggtgaggaaaagaggtccccagaggccaaaccacaggcctgggatcacagccctgactggctggggcaaagctcaagtccagacctctatatgggttcagatatctctggccttgatttaacatatgtttgctatctactcattatatgctaggatccaagttaccctaaatttaatagcaaccaggcactgtccctcactgagctcagagatcaagatgacaggcacaaggaaggttccctgggtgtcataagggaacattttctggtgcccagaaggagtagggatttgtcacggggagtgggtgagtcaggctacaggaatctagtcagaagtgcatggaggggggatagcagggccctggtaacaggaggattcaagagcatagcccagagtctagacagggagtcactcccagggcactgtcactcacagcccaggctaagaacagagtgtatctcccatacacagcagacaccctggggacagggacaaactgaggctctagcttgacccagagttaagtagcctgcctgcccctggcccatcccaggggcactagagaggtgggaggaaggtaagtcttgggggaggaggaggacccttggctaccccaaagcaggcctgacggttgtgtgctttgtaaagactgaggaccaaggcagagagtgctaagctgaaagcccccacatacacacaatgatgtgccctaccgggtagacacaacaggaagcctacaggctgggcaagggctaaaggaaacttccagaaaaggtggctaatcaggcagaggagcagttaagaggggaaagccctcaagtggaccagagcctgcaagaagaaccccattggacagggtacctgtgagggctgctaagttagagaaatggggctgcctagagactgctcaccctccgtgtggatctgttactacccgcagttcacagcaagacctggagggccagactggtgcagcccctgcttgaggaagccatgctgaatgcaggccaggccttcaggggtggtccctctaccccacgccccctcgctctcaggcctgttgggaccttgagccccaggggcctgcccaattcaccctgtcccaccacctggcccttccttcccacaccactagacctggctgtttagcagtttccacacgtccagcgcccggggacgggctgattgatctgtaacaccgaaaaaataataatggcttgatcgttaccgaggattaaaagtaatccttctgctgtggctattgcaactccgttattcacgagtcagcgggctgacccaggcctttgagcccgggggactctgtgagcttaaggagaccaaggactgaaccctccctccggggtgctcccttaccttgtctgctaggttttgaagcctgaggatcctcgtgttcttgggacccatgaatcctagggtcaaagccgtgtgctgagagcgtgaaagggcaagtgcataagtgtgcactcgcgcgcgcgcgcacacacacacacacacacacacacacacacacacacacacacacacacacaaaatggctgggggtaaaagcagaaaatcagtagaagaataagggagcagattccttagagccatggttcagtttggggcttcagcccagtttgttctccatcttttctatactaagaggccttagtctggttcccacattgccttagacccaacagttatgaaaagcaatggcctctacagagcccccaagtagcctcaagtcccactctgaggtacgtctcaggtcccaggggaaataagggcccactagataagaggaggggagatgccctggtgactcgaggctcctgctttgagcggtacctccagggactacctccctggacttggtggatcttgcagcccaagtatagagcttcacagctggtgtagtgcggtgcccacttaaaatgccacaaatcccttcacagaagggtactgcaggattatgaattgggaggtctcatctatcctaggggtttaagccaaaaggaaaattctttcagatgaagagctttgggggctagtgatattcagatctactctctgagataagggtccaggtcctgagtgtgaaatggattcagaaagactggaattgtggggcaggaccccacctgagtagggtagtcattggagcgatgacaatgtggaaggcaggcggtagaagtctcaagagaagaaagtttataccagggctgaggagatggcttagtgcgtaaacacttgccacacaagtgtaagggtcagagttcgattcccagaacccacataaaagctggcaggtgacgataagatccctggacaagctggctagcaagacccatcacatcagcaagccctgtgctccgcaagaaaccctgccttattgaagtcacaagcatgcacatatatcccatgtacatacccctccgtgcaacaaaaggagaacctgttacaggacacatggcaaattgggtagactgaagatcaccccagggaagtgggcctctattaggtttttttagaccctcttttctgggacctacatgcaggcctgatggacagggatgagatgtcctgaatacccaagacactggggtcttctgattcaagtcggaaacctaaagtcaggaccgggataggtggggccaaaatgaggaacactaggtatagagagccctgtgaaggagtggtctttggatcctatgggctaagcaaggtgaacgtgatagtagcgactgggttaggactccagattaacccaggctcactgtgcagctcactgtcctgcagtgttagcacacacagtgagcagtaatgggtccacatgtgtcactggccagaggaacggcttggcatgcagtgtcctccccataagctggacaagctggactccagttcctggtggtggcaatcactgtgtcttagttagggttctaatgctgtgaacagtcaccatgaccaaggcaattcttataaggataatatttaattggggccagcttacaggttcagaggtctagtccattatcatcacggtgggaacatggcagcaatcaggcaggcatagtgcaggaggagctgagggttctctatcttcctctgaaggctgctagcagaatactgacttccaggcaactaggatgaggcccacactcacagtgacacacctactccaacagggccacaccttcaaatagtgccactccctgggccaagcatatacacaccatcgcacactgcagttctcaagacatcactgaattctgtttttcgaggaggtttcatccttggagcctcagccctccctgaagcacagaatccttgagagtttcagatttaagcccagagggtggccaggtccaagggcctttaccataagccttggtgatgtgcccagtactgagcctcagttactcttgcctggtgatgctccctggtgatatattacattacccctccccaccataagaagtgggctgtctgggtctgtcacatgcccacatctctgaagagtctggcactaagcttgcttagtagcattagaggttaagagaggctcctatgggtggagacctgggagccctatgggaagcctgggagaagacattgagtctgaatgaatggaactgggcagtagacaagtcctgcggagcttggtcaaggcacagttgcataacaagacactcaataacttgtaggtttcacatgtcctgggagagaagacagtagctttcagtggccctggagcttgggcaggagggatgtctaagccaccttctggaagggctgcaggcaatactgagggtcctgtggagaagcctcttagacaatcaatcaggcaggcctcctgtctcctgtgggaacccaggagaggtatccctcctacagctgagaattatctaggatttttgaggctctaatgacatgaggaagagggaggtcctgagtcggactggtcttggggaggacggggcatggagaaggatttggggtggacatggggcaggcagcctgcctcagcctctgacttctgtgtgctctgtccctcagagactggctgacgctgcagagaatttccagaaagcccatcgctggcaggacaacatcaaggtaagggtcacagcctatgtcggatcagcaagatggctcagtggataaagatgcttgcctctagcctagtggcatcaagacccaggacccacttggtaagaggagaggacccactcccacatgtggccctttgacctccatactgtagcctgtgtgcacacagacacatgcaataagcaaacaaacaaatgtaattcaacaaaacaaaaaaaaaaaaaaacccaccgcatcccaccctccaagcacccaaggcgtgacaccttagctaggatggcgtgcagaggaagcaatgtgtgctgcacagtcactctggagaggcactggtggagtacagaatcctttgtccaaccctcaataaaaaccccagccccctcagtgttgaggaatgcaataagtcctgagtagtggcttggggtagctcttgagtagaaaagctttgctagaatggccattccccaagaagataccatgagtcttagagagtcccagtgtcataggtgcctgggatgttaatgccctgatctaaaagaggccctgggacagagcattgtctgtgtcctccctgattgtgaacagtggtctgtctccttagcatgtcctctagctgggccccagggactggcctgccaaagtcacaaagccttttctttcgcaatgaaaatcccgaaggctcaaacaccttggagccaagtgcagggcacagggtgtagggcccagagggtcaagcaaaacatagcacccacaccagccaattcctgaaaccaggggccatgacgccctcagtaaccacaccagtgaatgggctcaatgggtctgggtggtggctcccaatagtccccttgctagaggagaggctgagggaggcaccaagagttgcccccaggatctagtgacaatatacaggatggaggtgagacatatcttgctccttctggctctcagccaagctggtctagatctatgtgccccagaaagccggtggggttgttggctctacttgctgaggttgcctattcgcctattggcaatggagatttatagctgctatcggctcccaagcattcctgtccatgacctagccccctaaccctgctcctccggctctgcctccccagactgccctcccctgtctttgccttgccttcagagtagcttctttcaccacaggttaggaggtgcatggaactggaaagaacagctaatttatttctccttccttctccatttcactctttcacagaaaccagcatcttgagcacgctggacaaacactctatgaatgaactgtacccctaacccaagatgatcttttcaatgaagaagtaaaagtcagtgactcccgccccctaaacgaacttgactccctaggaccaggagaaaccctttctttccccactccatcgtagtcctgtccctcctcagccatggttgtggaagcctgtagtgacagctctcaggaaatggaagcagggggataataagccagcctcagctgcatagcaagttcaaggccagacccttgtcttaaaaatgggaatgggtgggtagagagatgcctcagtgggtaaaggcacttgcatgctctgtgataccaagaacccatattagagtagaaagggaaagctgactccacacggttgtcctctaacctctacacctgcctcacagcacaagtactacacacacacaaacacggaaataaatgcacacaaacacagaaacacacatatacacacaaatacaaatacgcacacaaatacagaaacatacacgtacatgcaaacacaaatacatacactaaacatacatgcacacatgcgcacgctctctagtagagctctgactactcttccagaggatcctggttcaattctcagaacacggcagctgtctctaactccagttctagaagatccaatgccttcttctggcctctatgggcatcagccatgcatatggtacacagacatatatgcaggccaaacactcatacatttgaaattaaaaagtaaaaagagatgggggttagagagatggctcagtggttaagagcactggctgctcttccagaggtcctgagttcaattcccagcaaccacatggtggctcacggccatctataatgagatctggtaccttcttctggcctgcaggcatacaccaaggcagaatgctatatacataataaataaataaataaataaataaataaataaataaataaatagataaatagataaataaataaataaatcttttttaaaaagagagaaagaaagaaagaagatgccatttgggagtggtgcacacctttaatcccagcacttgggaagcagaggcagtcagatctctgagttcaataccagcctggtctacagagcaagttccaagacagtcagtgctacacaggaaaaccctgtttcaaaaaacaaaaacaaagacaaaaaagagagagaaagaaaggtagataggtaggtaggtatataaacagacagacagacaggtaggcaggtagatagataggtagacaggtagttaggtaggtagataaacagacagacaatttgatagataggtcaacaggggctcttcctcagatccatgctgccacacccagacaatcccacttcacagctcccctgtcccaccccactacacttaggccacccatctgcccactcctgcatccttccatggcctggtttctcagctcctcctcttgtgctccaccaccctgagggcctctcccaaggccccttcctgtccctgggcctcagtttctcctggattccttcatgctcctagcatgctgaccttcagctatgatcttgtctcagctcgtcattggctctgtcctgagtgtcggggaccctcaacttcccgtcagtttcctcatttttctctcttcatcagcttgttttttcctatgagcaggcctgtggagcaggacaggagttgagaaataaatgcaggtcctgccctccctttggttttctttccctcctagtccaagccccagagagggagacaaagaggccaccacagcataaaacctgttcctcctccaggttcttaaaaaacaaacaaacaaacaaacctatatttcccagtgctgtcctgcctggcctctggtccatgaatctcaatagtcccatttattctgggctaaggtgggcattggggatccctgagagactgctggagcttagggggacccaagagcactgagagatgctgctcaaggacccacttctatatcactggatcacagttttacaggatacaagcagggctccttttccccattggccagctaatgttggtgctacctatcagcttagtaaggcctctgaagggtgctcaccaggccgcatgggtgccaagccagttatttatggaacacctctgtccgtgcctgtcttgcttgtaactgccctgggctgacacagaaatggtctctggctaaccaccctcctgcttagcctgagctgctacagatgtggttgtggccacaggctgcactggccacagagagagcagggctttgtttgcccagtgccctcttccctgtgctgtcagcccaccagtgcgcatgcctgagatccccaggggtagggcctgtggtcacctgtttcttccagactgcaaggtcactgctgttcccatgaagatctgctgctgctgtgactgccaggctgaaaggcattagtgctaatggtggcccattagcccacctgccagccagcactgctagggagaactggcaggggctgtccatgacaggccatgcagcagccgtggctggggaaaggatgtggtttgtcccttgcaaacataaaacccaccctgaaatccaatgaccttgagaaggtgaacaacaaggagtcacattcgtcctccatgcttaggagagacaactgacccgtgtcgcaatcccagcctcaagctcaggtccttccccaggcccagccttctcctgggaagattctcgtcccccaattcataaggcaaagcccaggattccccttcccagccacagcctcagggctgtcacacacacacacacacacacacacacacacacacacacacacacacacacacatacacacacacacactgctcacagcaccttcttctgggcctctatgtcatagacatacccaggcaagtgtcccatttgtctgtctcactcatgactccttcagatcaggggcagccagacctgtgtcagtgccatctatcacctgaccttgtacccagtcctgtgctctggtggcaaagtgaccaggagtggtcttcttacttctgaatgggggacatattatccagtagttgtgggcatagagtgctgggctcacagagctagacaggaaatcactgcatggttagtaaggtgtgtatcacccagtgtggacagtacagagcaggggacagaaaattgtggtatacttgtatatacacacatatatccctatgacaaccagccagggacctaggaatccttgaatccactggatcagagctgtgataccatcaaggggccaataaatggtggtggagggaggggataaaatactctctaattctaggccatgaccatactcatttgatcctggcagggtcagggatccagtagccacagcctagagttgggaatactagagagaccatggcctgatttacaggcagcagctcccgtggctctacacagacgggcagcaggtggtctggtacccataacacttaacagtagatgaagatgggccacctgctggacggtgcccggtgccaacatcacactgagccaacattgtttgccacctaggccgccaccaaagaggatctgggccagggcatgggttggggagagagggaagagaagacagcccctgggccccaacctacagtaggagaccttggagtctggtggcagtagtggcccttcctgtctgatggggaagataaccctagctacagaatttagagggagacctgtgaagtcaggactaaggcctgaagagccagctggacaagacaggtggcccccctggcccaagggtccaacccagtcatagggctcaccacctgtctctgtcaagccagcaacagacggctctcaggaaaaaaaaaatcctttttggtcaagctgagctggcagtgggtccgggcaggaaggccacacgacctcgttggggtggctgggtgcctgcctgggctccgcacaggggactggtgggcaggtgacagtcatgtctgggcagccttggcagctgccttgcaagatgccaaatctagacgacagccctccatcccacgcatcccgggctcttcctcaccctcctgctccatagcttcaaacaggcttcatgtcctctcaggctcggctcctactaagaagccaaggtgccatgcactcccgtgcgtacacactgagtcctaccctcaccagccgtttatgtatacaggttcctggtgggggtcgtgtgtgggagttagggaggccatttacccaccttttgccaagcttaaacaaaaaatgaaccctgaaaggagggaacagataaagccaccaggacatgctttcaacactgatgtcacctatgtcacatcatccaagggtcctttccacactcagcccttcgtgtgggctgtggggctggcctccagctctgatgtcctctgtcctctttctgattgtaaattgtatggtgggtgacggacccctggatgcaaagctcactggggctgcatgttcttcttaccttgccttatggagaacgtaggggtgagtcctgaaaatcatcatgggcctactggggcaaatctatctggatggtgccttcggtttgtgtttttgtttttatttcgtcttgagacagggtctcactatgtagctctgcctaccatggaactcactctgtagaccaggatggcctcagatttcagagagagccacctgcctctgcctcccaagtgcagggactacagggccaccacacccagcttactcagactgtattgactcgatgatcggcgctaatcaaaacttgaatcacagacccttcttcaagagccccgtgctcactcagtagatagtcttcctccttgtagtgctcactcagtagatagtcttcctccttgtagactatcaggacgtgagtcacgaaagccaacattctggtgtagctcaggtaaaagcagatgtaagccttccttcccagagacctgctcccacacactgggatggctcgacccgccgctctcacatcccatcacaaatagaaatcacagctgtgtgtactgtgtgttttcacatgtgaccttgccaaggctgccagcattggcaaggggcaggaagactgcagataccttgggccccacccatggtctccaggaacctgacaatcctgcatgctatttccctttatctcttatgccaacaaccttatatcttccactgagactgtaaaacagcagaaaaaaataaacagaatcctgggaactgctgaagagacggcccaagtgagcgccaagacaccctcaggatgactagggtacagatggaccccctctcacagcctgacaatggccagcccccacccacgccctttcccgtccttgcaggagctttgccgcaaaagttggcaagtgaagccccaggtcgtaatctgcagtcctcccactgcgcccgcctgttttcattacggcgggaaagagcatcggagccgtgtttataacccccttttagataacaaatcacattttcttttcgcctgcgagtgtgttgaattgatattttttccccctcagtttaatgggtttgtgtgttcaggaatgatcttcatcaaccgaaactccttattgtgtttgatgtaatgtcagctttcattacgtgcttctgtgtgagccaggcatagggaaaggctgagccccctggagcctgggctctgccccagccccctacccgggcctgtcttcctagatgggtgggtgggtggcaagtctggatgaggctggagatgagttggaagggcaggtcaaatcctgggtataaaaccttcttctttgttcctgcccttgtgtctccacgaggcatatattagagtcaccagaagtgccacacatattagacacctcttgagatgtcagccttgtgccaggcattcagtcgctaatccagaatgcttaagtctctgtgtccagccaatcacttgtccataaccagggaacccctgaagaagacagcctgagactatcaccttaaacattctcaaatactgaccaactaaaaccattggccacaaacctggcatctggccaaaccctcccttggaggcatagggaggctcagagagaaagtggtgcaaccctaaggtcacacaatatgctctagctaggcctcggatggcagggtagcctacatggcttccacccctcatggagtgagtgctggctctatgcaggctgctttgtaggcaggtcctagggaacagatcaggccacaaagaaaagccccagctgtgtaaggaacccctggagcaacactgaaggatcttgtactataaaacatggctgaggagcacctggggagtgacttggacagtggccctggccctagagcccaccagggcaaagtgggacggccccttctgggcgagtggcactcactgacacgaggctcaccttctggcggcctctatcagctgcactcggttctgattaaagatcattaaacatgaaattagcccgtttgtgttacgggtccccggggcgacgagtgattatgacgtgcagatggccaagaacccaggcggcaggctggcaggcccgggccaggatgggcaggcaggcacatgcgagtgagggccacaggcaggcatacgggcccagctttgtttattcccgctcctgttgtgtaaacccctttgcatttcacaacaaatcacagataattaataagtacatgctcgtaatgagcaggctttttaatagaagaaattggaagatgcagtgtgaagtcattatttcgctgtcgcccaggctctgttctgatttcctatcttcctcactccctggtcctgcctcagccacagccacagccccctcagcagccaggctggctctgaccctgcccacaatgggcccgcagggcaaggctctggtactctatgtcaggggaccctggaatgcaacatccttccagagagtggggaggacctgaggctaggccttggggttgcgggggcagggtaccagctgtactgactcaccccacttttcctgggggtggctttggggggaggaacggactgaatcagtcctagaggaagccaaactgttctagggcttggcagacctgaggatccagactgtatcttgggagcccctgagctatgagcactaaagcttctctctcatcaccaggaggaagacatcatgtactacgatgccaaggctgacgccgagctggtaagtgtccccacctttgccgtagaggatggggagcagccagagccacaccttgttcttctgggccacaacagtctcagctgtaaagtgggtgttagggatccatgctcacctttctgaactcaaccattctgtgtcatgcttggtcagcctctccttgtccacagctccctagagatccttgaccctccagggccgtgtcttcatcaccattataggctaagctccccctgcaccatgtggagcaagctgtgtctccctctctgggcagggtggtagagtgttggatatcagggtggttccatcccagtatgaggggctctctgggctccatgggagtagagaggagaaagaaatagacttcaggacttcctggggtaggtacatgggagtgagacatggtgacatctaagccctggcccaggacagtagaggctcctttccttgtgatttggggaactttgcatcaagctatgtagagaacccatggcctggcctcactatcattgcttggccccacatctcttggtggcttcaaatacagaggcagcccagttcctgcatctgtttccagatggggctcagctcgaaccatgatagtctcccagaagcagcaacgctgaagctaaaccattttatttccatatcccatgacctcaggtcttcttgggttagcttggaaggtggtgaggtccccatcatgagagggctcagcaagaatgactatggggtgacaaagagagccacagaggacaccaacagtgtccctgggttcgagcacttgggagtagctagtgttctgtgaacttaccagtgtctgactccaaagcacagtggttgaacctaactgtaaacagcgtgggtgcagtggtatagtgtctagtactgatttctgtttgctgatacaaaaaacccaaggtccagcatctccttttctggcccggaggcctggaggcctggaggctttcctggcctatacagaggtagcctgtgacacaaggggtgggaaggctggaaaggatacctgggcgggaggccatcatgctaggttagcctaggaagccttagggaaagtggggggcctgagaaggaggaggtgggctcaagcaggtgcatttccccttggctgagctccgtggctcccggagaagttgctaaaattaaagctggaatctgaaattcaaatgaagagcgaacctttaattagaccctgaatctaattccttacccccctcggcagcgggctgtaattttagcaatcagtacattaaatataaaccaggagactacagttgcccaccgcactgaactcctaggttccgctagcactgagagcccccctggacagccttgtacccaaatcctgaccaggacacagcttcctgcctccagcagcccccaactctatccaggaccccaaccctggctccaaacgcctcccgctctgcctcccggccctgcagggggattgaactacccagtagggaagcactgctctagtcaggcctgggctagggtcagtgaggccagaagctccaagcctgatataaataacagcgctcgtgcatgtgcgcgcgcgcgcacacacacacacacacacacaccaagtcccctgcttagtgtgttgtgttgttttgtttggtttgtttttaatctttgccagaggtacagttagagatctttctagaccatttacttttaaattgccagccagaaggtgggggtgggggaagagaaggagaaagttcgcaggctgaaggcttatcagaatggaatccaaatgtcacattagttgggaaagttgggagattaaatttttcagtgcccttcatctgccgctgacatttgggggggctttcttctcccacgcctctccctctgagtggagcatacgtggcttacacctcccagaccgctggctccctactccagcccatatgctcagcagctgcctaccctggctttacccagcacctaaggacattccaggggcttcccaaagcgggcaggaggtgggcgtgcccggtgaagggcaggaaggacaatagacagcttgaatgttgatgtccaaaaccatccctgaaagatgggtaggggacagactcgggtcacttcagagctgtgtcctaggatgtggcctggtggaaatgacctgggcagtaaccaagagattgaaatgctctaggagggagaagtctgggcttcagggagccaaggaagagcaaccctggagacccattgggaaaaggataaatggagcctgcgctgaacttactcaaaagggtcttgggtggggaaacagggtgtgggagtgtgtggagcattccacacgtctcccttgcctccctgtctggctttttcttcttcctctgtactttctccagcatcttcctgccttgcttgcacacctgcactggagcctgttcccccatgggcggcagcatcgtctctgtagccaaggcgccactcctgccagcctgtagtagtaggcggctgggggttggggggctgcacagcgcatgcccagcttgcctggccgagagataccataattggcacctgtcaggcagctgcagcttgttttagaaaatcaacgggggcctttatagtcctgctgctagcgggcatggtagaccctccctctgtaggtcactcggtctctgtactagcccccactcatctctagagctaccctgctatgggagatggttccccaaatggggctaggactgtctggtactaaaggagccggtatacggcgggggggggggggaagggtgggactcagcggggagtatgggggtgcaaagctgcctgccaaggctttgctgtaattgcacaaggcgtgtccttggaagcagaagtctgcagcccactcctaactggctctcctgtttgcctccttcactgacagttgcctttcaaggatgtagagaaggggtcatttggttttggttttagctgtgatttggcaaatggatgggcaaaggcaggcaaattcacccagggaagccttctggataaggggtccatatgctgtacccatgttctcccatgtctctccatctgtctcttgtctctacaataacctctgcccttaagatgaccctgtcttctggactctggccctccctgtcctcacctgcgagcctaaccaacccactcaccattttcctgacacgggtgggggtgctttctgcaggatgaccctgagagtgaagatatggagaggggatccaagaccagcgccttaaggctggacttcatcgaggacccaaacttcaagaacaaagtcaactattcatacacggctgtgcagatccccacagacatctacaaaggctgtaagtgtaaggggaggggggaagagcccttcccacccacgtggggtagggcccactccctgagcattccaggtccctgagatagaaagctagtgccacctacctctggccagtcccctgcacccaaggtcatacacgttcatttctctgacctacccacatatagaccttcacacttggcagaacttgaaacacagcttctttgctggtatggtctaagcctatgtgtacacatatcccacatatacatgcacacatacatcccttgctctcactgctgggctgaatgcccccagaacagccccttgccgcccctgcccgtctctgactctattaagaggggctggctgggaaatgccagcataaggtggacacagagattaaaggccgcaaggcagctgccgtagacaacagtcacaggcctgactaacccacttctctctatggcccagagctgaaagaatgggaaatggtttctatcctgcaatagccaagagtgtggtgaagggggaccaggaaaatatggttgagattccaagtcccaggggtgggacagctttgcacagtggagtcattatagctccagtctactgctggggcccctcatctggtgtttggctctaggcatcttctccatatactgttccagttccttaggaacttcctccagcagtagattgaaggccctgcctggttctgacattaccatgtgagcacctacctataggacagtctcaaaatctgctgggtttggaggaggtggaggatggtgtgctgggatgctggggaaatgggggcaaaggaggcagagctactgtataggttccaggaaaagggggaaccctagggtcttccaggaagcccctgtcgccctcaacgtcagccagccccgcccccagcaggatgccagcagatcacctgcatgagccagtcgagaggcactatcacaggcaggcacactaattaaaacaggagccacaccaccctccccagtcacccctcgctacccacacaaattacattttatatgttctttatttactgtgtcacttttaattaaatctgtaatcgcctgcctgagggggcatggtccccatttcccaactcattgtgatctgagggtgcgcacatgggtgtggcgtgggcgtgtgagcatgtgggggtattcacttcagtgtgtcatacaggtatgtccttgtggtcgcagatatctgtagggacaatccacctgcagcaagagtcacccctctgctggcagcctgagggacttccaagtttctcagacaggaagaggcccagggatgggtaggcatgccatgcagactcaaggacacatggcattgtgcgaaacatttgggtgccacgcttcattttttccttaaaaagaaaagtagaagtgttcaactcactaggcttctaaatcagaaacaggaccataacacactgctcaataggcagagccaatggaagaaagaggtttcatgttgatattgtggtcagttaagaagaaccagagacagagagggatgaaagccaagctcagggagcaagacagcagagacacagcacagcccgcacacaaagcaaaggcagaggggcgggcgagggttggcaggcccctgggcaccggcagggcctgagaggctgtcaggcacagctcatctgttctcagggaatcaaaggcctgagagaaccttctctgcctgtcacttgagatctctgatagggatcacggagggtagagtggcctgatccagtgtagagataaaaacatgccacacacacacacacaccaggtagacttcggggcaccctgagtgatgggacaaaaatgccatccaggttggtcaacagagtagagatcagccttggtcggtggtaggcctggcagaagggaggggccacccaagtgcagccacaggggttaatgagggtgggtaactggtggtagcatatgagaactcctgtgtacccctcgcccatggtagcaattgggtgggtttgggcgtaaggggctggggctcctacgtttggctggaagcacagaaattagaggcagcgatgcctgccatggatgcaggctgtatgtacgtgcgcatatgtgtgcaagtgtgtgtgcgcgcctgtgtcggaagaggatcctggccccacccctgcccctctgcagcccccactgctgcccctgcctgctcctggccccagttgattaatcatggagctgagtggcttccagcttatcaggtaccttaatagctgaataattccagccccatcagcgggcccttaattgctttcttgtggctgcggcctggagtgcatgctgagtgggtgagctccctgggggccggctgcaggctccaggcagcatgctggatgggggcccagctcacagctccctgccacccaggcggcccttctccacaggccacaaaccacatcagccctgcttgctcaccgaggcctggatgaggggtaggctgagatattcctttgatgatttagaggagggagagcaagaaaatctccctggaagagctggtgtggccccacatgagatcctgggaaatcaaagaaagcctgggcaggcagaaagcaggggaggccacggagatgggtttagcagggggcgaccccgaacctcccaaccccagccttctgccctgcccctcagctaccgtcatcctcaatgagcttaactggacagaggccctggagaacgtcttcattgagaaccgtaggcaagaccctacactgttgtggcaagtctttggcagtgccacgggagtcactcgctattacccaggtaggcaccactgtctccctggcccatccagcacccgtcttgctccatctccaagcctacccattctgaggtccatggggtacaatgaaccaggtcaatccccatcactcccgcctgctccagtcagacccttctgccgggccgggccccttcaccccctctttccacagccacaccatggcgagcccccaagaagattgacctgtacgatgtcagaagacgaccctggtgagtgagcaaggggggtggaggcgagacaccccctcaactccccatctttcgtgcccgctcccctccctcccaatatccagacctccgagcagggcgcagccagctctatccaattttcatttcacacatcgctgccactggaaaatggatcccatcgcccaggcaagccgcccagctgcctctgcccccacgcgtgtcgtccactacccagcccccccacacccactcagaactgaaagcagaccaggggagggtgcttccaggggtagctagagcctccgtcaggtcagccggccccacctactcatttgatccctggacaccccgaccctctgctctgcctctctcacactactccatgatcttccctccctcctccattacacagccagactctctggagtctctctaggacagaggacacaagccactaaagccttctgtccccgtggatcacctgcccctccccctcacctcttgtttacttaatgagggaaccagatcactcacgtcacaagaaaaaaaaaactgtcttttttattgagcatggtcttcccagtgcccaggcccattccaacccccatagtgcgtggtcagtagaaagaagcacaggaatcagtaagtgggtggaagaaggaagaccccgcaggtcccggaggtgccgtccttaactgagtcttctcactggcaggtatatacagggggcctcatcacccaaggacatggtcatcattgtggatgtgtgagtgagccttgtaggctggtgggatgggctaggactggactcttctgcccgggcaccttatgagggaaggacgggaaaaccctgagagcccacatgcatgcgccccctccatgcctggtttccaggagtggcagcgtgagcggcctgactctgaagctgatgaagacgtccgtctgtgagatgctagacacgctctctgatgatgactatgtgaacgtggcctcagtgagtggcaaggtggcaggcaggctgggtaccactcacccccatccaacctgctcccatgacaaccatcagccctgtacaacagctgcacactgtgtggccagcctgaagccactcaccaccccccactgtccccacagttcaacgagaaggcgcagcctgtgtcttgcttcacacacctggtgcaggccaatgtgcgtaacaagaaggtgttcaaggaagctgtgcagggcatggtggccaagggcaccacaggctacaaggccggctttgagtatgcctttgaccagctacagaatgtgagccccacgggtgggcaaatgggtagcaaggggtgggcgagggaccaggcttagtgacatgggaagatgaagatggattgccttgttaatagtaaacaggcagcttagacagacagtaccatctgccgtgagggaggaagccccaccctggacctgtgagagaccaaggattgcctgactctgtgttcatcctccactagtccaacatcacgcgggctaactgcaataagatgatcatgatgttcacggatgggggtgaggatcgcgtgcaggatgtcttcgaaaagtacaattggcccaatcggacggtgagcctcagccctggtgggtggctgccctgagctgggtccaggacgggagagggccgtcgtcctccggtggccattgtgataacctcatcgtcccggcaggtacgtgtgttcacgttctccgtaggacagcataactatgatgtcacacccttgcagtggatggcctgtactaacaaaggtacctcatcgggtttcagcctctgcctgctgtgtccttctgctagctgtccatccatgtgtccagctgtctgttcacgcactgtgtgtctgtccttccatacataccctttttccggtgctttgtctacttggtgggctgtcttgcttgaccatctggctgtatgtcccctgtctgtctgtctccagcctttctgctaatgtctgtttgttgatcaatccatctctgttgattgattgggtaaaactcacgtttctgacgtcctcgcatgaggctccttcatccaccctgtctctgttaaccactcccacctctgctgcttctttagacccctacaatctatcctctcctgtagcgttggtcacagtgccagggcagtgacagggagcataaaggagttgggggagagtcacaatacacagagtgttgcaggtgtacccaggcgacattaccccctgtgctgcgggccttgctgtgccagtcaaacccacatctcctccctttgcaggttactattttgagatcccttccatcggagccatccgcatcaacacacaggtgaggttgtggaggaggcggcccctcccaggccttggcttccctctggttgtggctgcgtgcttcgtgtgctttccagccatgggccgatagcgacccctggtggctgctgttgtccatggcagcagatgagagaagagtgagttgggaaggacatttagtgcctctcctctcccaggaatacctggatgtgctgggtaggcccatggtactggcaggcaaggacgccaagcaagtgcaatggacaaacgtgtatgaagatgcactggtaaggcttctgggcaaagaaaggggactagtggccttcccccaaggatgtccccacacagtcaagaccctcgaggggccccttattggtgttgaccaagtaaaagaaaatgacaggtggcctgtggctgggccccttctctgaacactcacagtgaagacagggctggccacaggagaccccatccttctctcccttcaggggctggggttggtggtaacaggaactctccctgttttcaacctgacacaggatggccctggggaaaagaaggtgagttgcccagtgggttatctggggaggagttggcatgcctggagcaggtctggggatggaggagggttagggcatgctacagatttggcaaagcagctctccgtatcagcagcttagcccttaggcctgggccagggggttctactatggagttgactcattatagcataccttcccattcctttgtgtccagaaccagttaatcctgggtgtcatgggcatcgatgtggccttgaatgacatcaaaaggctgactcccaactacacagtaagtgtccacctgcccctctgccctggtttgctgtccatagtgacacaagccagactcagcaggggagacatggggactgaaagaccgtcacagaaagacttcccaaagggtttggtctgaagctggggacagcaagcttcacgggaaggactagtctgtgagtgtttcaggccttgctgatctaaacatccattttccacgctaatactatcatgtgaacacagctgcacacaaatcattgataaatggcccatgcagatttgtttcatttttattggttggttttttgagacagggtctctctatatagttctgactatcctggaactcactacataaaccaggctggcctcaaattcacagtgatctgcctacttctgcctcccaggtactggaattaaaggtgtataccatcatgcctgatggcctataaggttttatttgtagatattgatatttgaattccataacatttttacaacacaaagtaattatttttttattttttttcaaaaaatacaatgtgtgtggatattttgcctggatgtttttctgtgctgggtacctctggagtccagaagaagacgctgcatccctggaagtagagttacagatgcccatgagctgttgcatgggtgctggaagtcaaacccagtgctctgggagagcagttagtgctcttaactgtaagctgcctctccagttcccaaccttaaaacccactgggcagtggtgatccactccttcaatctcagcactcaggaaacagaggcacacagatctctgagttcgaggccagcttggtctacagagggagttccaggacaaacagggctacacagagagatcctgtctcaataaataaatcaagccataaaacccacttgaggcttacagacaaattatagcaacaggtggcaggccagattcagccctgcccagaagtatgctggcagggggtaggggtggggtggggcagaaggactcttccaaataagagcctgagagtggaaggcagaaactggagccaaggaagggacagacaggatggtggtttggctattcagagcctgtgcttagagaacttgggtctcaactatgaaagcaagaacaagtgctaaatgtgtgtgacaacttcaagcctgaaccatgggaaacctttgtttggcctgagaggccccacatacagtaagaaactcagaggcaatgacttgttcttggatgccactcccgggtcttctgccaggcctgtgggagcctaagagtctctccttcctgtccaccaccactaaaaaggggacaggaaagcaacatttgagaaagtagtggatatgagggagccacacagcggcccaaaagcaatagcctgtgagcgagcgtcctgcagatacagaggttgggctggctggttcctccgtgggaaatgggaaatggagaatgcccacctacctacagggctagtcaaccttggcgtggactggtgtacaaggaacacccagcctgtaaaggcaagcagtatgggaaacagaatggagggcagctcagagtctaagaaatccccactcagccctctgagccccccaacctgtaccccacagctcggcgccaatggctatgtgttcgccatcgacctgaacggctacgtgttgctacatcccaatctcaagccccaggtgagccaagtgagtagccccccgagggctgggagcccctccaagaccaggactcctgacttcctatctggcttcctgtagactaccaacttccgggagcctgtgaccttggacttcctggacgcagagctggaagatgagaacaaggaggaggtgagctgaaggcctggggggggggggggagagcacaagaaaatagctggcgcgggagcagggggttcacacctttggcccttgcagatccgtcgcagcatgattgacggcgacaaaggccacaagcagatcagaaccttggtcaaatccctggatgaggtatggaggcacagaccagggaacaagggcatcggaatggacacccatccctacccaccctcccctgcccgctcacccaagaacctgatgcagcctcctctcccagaggtacatagacgaagtgattcggaactacacctgggtgcctataaggagtaccaactacaggtgagtgggccaagctgggcagacagggaagggagagagtgaccctgacatctgaacccggttgcttctctcctcttgcaccccccatccttactgtgtgttgaccctgagatgtttggttctccagggcctcccctggcccctgtgtgacaagcagcatgtcctagatgaacaggactgaggacaggacagttcacctaacatcccccacacacacctggagggtctcctgggtatcacgctctgctcacaatctgcaccatggcctcagagccagtcttgaccctctcagcataggctgtcttcactgtggcctatactgcggctctggggtccattctggaatgccaggagcattctcacaccccaggaccagtccatactgttccctggctctcatagggttcatgttactgccaggagatggtggggcagatgggtgactgaggtgggcggtatggttggggagtcannnnnnnnnnnnnnnnnnnngcccctgtgtgacaagcagcatgtcctagatgaacaggactgaggaagggacagttcacctaacatcccccacacacacctggagggtctcctgggtatcacgctctgctcacaatctgcaccatggcctcagagccagtcttgaccctctcagcataggctgtcttcactgtggcctatactgcggctctggggtccattctggaatgccaggagcattctcacaccccaggaccagtccatactgttccctggctctcatagggttcatgttctgccaggagatggtggggcagatgggtgctgaggtgggcggtatggttggggagtcactttggaactagtagtttcgaagcctttgggaaggtttggggagaagagagcttaggacccctggtgtctccaaggtgttcattcctaggatatgcagttgtgtaggggaattgtggctaccacagcttgagcctctttggctccaaggccctaggaaaggaagggtgagtgtggcatacctctcctcatcagtgacctgtgctctcccttcccctcctccccagcctggggctggtgctcccaccctacagcacctactacctccaagccaacctcagcgaccagatcctgcaggtcaagtgtaagtggcctggcccctgcctgcgtcctgcacccctgcctctgcccctgcacccttggccggccccaggcagcacagccagccgagctttcgggcaaggcagcccttcctgcccagtctgcccagcctcaggagtgcccacaggctggggaaccagccttcaaaagtctgtggaaatctgcatgcttgccttttctaggatttggctctagaccattctctcatggtttccgttgaggattgttttcgatttttcctatcccgtgtcttccgtccttagcctgcctgccctgaacactcctgggggctacattgctggaagacacccctccctcccttctcttctactccctttgccctggtcctccctctgtggtaccacctctgtcccaaggtctcttgtcctctgtnnnnnnnnnnnnnnnnnnnnnnnnnnnnnnnnnnnnnnnnnnnnnnnnnnnnnnnnnnnnnnnnnnnnnnnnnnnnnnnnnnnnnnnnnnnnnnnnnnnnnnnnnnnnnnnnnnnnnnnnnnnnnnnnnnnnnnnnnnnnnnnnnnnnnnnnnnnnnnnnnnnnnnnnnnnnnnnnnnnnnnnnnnnnnnnnnnnnnnnnnnnnnnnnnnnnnnnnnnnnnnnnnnnnnnnnnnnnnnnnnnnnnnnnnnnnnnnnnnnnnnnnnnnnnnnnnnnnnnnnnnnnnnnnnnnnnnnnnnnnnnnnnnnnnnnnnnnnnnnnnnnnnnnnnnnnnnnnnnnnnnnnnnnnnnnnnnnnnnnnnnnnnnnnnnnnnnnnnnnnnnntcccctctccctaaacctaaccatatacctctccaccccctcccccctccccttctcccttctccctctaccccctttctgcctccttccctctccccctccagctctctcactcctctgcctgtgactccccatgcatgcttgctcaccatgggcctctctggaaaggcctggatctcaggcctgaccctgcctgcccaatgccagaggtcgctgggagggaggctggggctccggccccaccgggcgccccccacctgcctggccgactggggctcatctcctttgagtttcttgctctctcttttctctctcatgtcgttttttttgcaagaagtttcctttcggtatgatgatgagacacaatattttcattcaaacagccattgaataaaatattgtttgtgcccctccccttcccctcccccttttcgtttgtttttgtgtttgtgtttttgttttcctcgctttctctcttggtggactgtcccagtgccaatcagcaaactgaagggcaagtatattcagaaccagtgctccctcctctccccaccccacccaccctcacgcccctgcttgccccccttcctgcccaggaccagccacacccctgccctctggggctccctcccagcatccctcggctcctcagttcttgcctttcctctgatcctgacaccccactagagccagtagcccacttctggggctgtctgcagagagttctccagtgtgtcctgggggtccagactccttcctcctattccccagtcctgtggtaccccatgggaagtcccctgcctccccaacgtctctggccctccgagacaactcaacagtgagaacagaactggatgcttcaccaccacccacccagcagggcaggagtttcaagatgcagttggtagggaagtcccagcaggcaccctctagaaggctcttaggcctctgggttctggtgtggccccagagctcacagccctaatagaagaaaggtggcaaggctcagagccttagtggggatcacagagggcaggcagcctggacacaggaggacaaggttgtcccaccatcctgggttaacatgtgctgttgctcctgctgctcccaaggccttgctaaggacccttgggctacctctgcccttagggagggctcatctgtatggggaaagctattccactggggaaataaaggcagactcaggaaactgtattctcctccaggcacagggtgggatcttttggatcccaagagccaaccaaacggtctagaggaagacagcctactgacaaagcaaagggcccccaaatcagttcccagaacagtggatagtgagctgccaggcctcatcagagaacagtgggaggtagagggggtggcaaatgatgaggtcttcctttggtagatagactgctgcctttccagggaacatttgcccctgtgaggcatggagaaccacatgaggatgtcccccattcctggaagcagagaactaactcctcaagaaacccaggggccttgtctagcctagtccagcaaagggagttaagctgtgcctgctggcctgggtcagggtcggtgcataccccaatcccactggcttgagttctcatttgtaccatctcccacatcccaccctctgaccctagaacttcaaggccctggtaacatgacaaacatagtatagtctccctccttctccctcttccctctcttttctttctcctcttccccttcttcccaccctactccttcacctttggcttgtgtccaaaccctgcctcatagtcctatcagaaaggaacagtccaaccagtgactgccagcccttcacagcagccctagtttcccgggttcagaaccttgcagtgcatcatgggagtattcgggaaccgtgaaaaatccctcttttggggacgacaaaagctctgtggtaaaagagtttaggatgttggtgaggatagggtagagaaagccaagtgtggtgcaggcctaaaatcccagcattcaagaggttccggcaagaaccggcagctagtcaaggcaaccgagaccatcttttttaaaacaaagggagatggactggcagaactacacaagcccagggccctctcggattcccacgatggctggggaaacagctcagttgcttgtcattgcctggcatttacaaggtcccaggttcaatcgccagcatcacgtaagccacgtgtgatggtgcgtgcccatatcccagcattctgaaggtgtgtgcaagagaatcaggagttcaaagtcatcctcagctgtataagggaggcaaacacggactgcagagcttgtctcaaaagaataaaatctgcacacagcagggtaatccggtccagatgggcagagagagaggccacattctcaggtgtgtgagcacacgcccgtgcaaaaacaaacatgtacacatacctatgtattcactgcacacacatgcacagctcgtaagcccaaggcacaggcacagctgttagaccatcccccccagacactcccagcattctcccttgtctctactccttggaagggaggagactagaccttccctaggtccctggctcctctcagcctggaaagcaggtgtgcagagtccagcagcagccctgtctcatcacactccagaacagttcctaccccctgtgggttccccatcccccagcatcctgttccaggaagaacaccccagccccagacctccacgatgcactgcagtacctccactgccagcagctgctcacacctgtctctggttggactgtctgtgcccgtgagaaaccctttcggtttggccatgttgatgcctgacacagaacaaaagcaagacctaccaaaaatgcaaacagctgcggcaaagagagattttttttttaaaaaaaagaaaaaaagaaaaagaaaaaagaaaaaccccgcagcccaaagctgattcccttcctcaaagtctcttacggaggcaaaggaagctctgcatgcggtttttccattatggatgtgataagagctagaccggcgcctcccccagaccatgcatatatatagcagtgtgtgtatatatatgtgtgtgtgtgtgtccgtgtatatgtgctatacagcagtatggaagcatatacagccacgccaagggactcactgccgacagaggaccaggcccgggcaacatattggctataactgcccttctcctgcgatgctgtagtctccacaggccccacaccctcctcgccctcccttctctctggctcaaacctgaacgcggaagtggcgggtcccctctttgccggtgtctcccccctccctcaggctgccttgtccctacctgtccctccagccccatcagctctgagccccctggcctcccgcctccccagcccccgccggataacccccccgtttctgttgcagattttgagttcctgcttcccagcagctttgagtctgaaggacacgttttcattgctccgaggtagcttgcgtgtggccttgctgaggcgtcctccccctcccctgaccgtcctggccccacctcctgcactgctgcctggagctctgtgtgtctattgtcctgtgcagtgttgctcccaaccccaatacatagcccggtatgtgcggctgtgtacatacccaggccatgtagccgcaccaggcagcagtagcctgtagcccacagaccatctcccgccaggccaggggcaggtgggctttggattctctgccaccttctgtgccctcccaggccaccaggaaggaggagccctttccaccttgggctggctgtcctccagcacaccctcgatgggcagctgctgctctggtctgtggcatcctgcccatacctgacccacccaccccctgttgttgtccttcgtcagtcagtgtttgtgtgggtctgagggctgagccagccagagcccctgtggccattgccagtgctgctcatccttggtgtggtggctcactgagcataggggagaaacaggagggagggcaagaagctgaggagccgctctggcaagtgggggatcagaacccagagccatcccaggagtgcacacccagtgtgaacacaggcatcctagtgtgcacacagtctgccttgaactacatctgaggagggccatggcccctggtgctgacgccctctctttcaatctgggttttaaatgagagcactctccggcataaacggggctctggacactcctaacctccgtgcgtaggcacgttgcgtgcatgcacccacaaatctctgactctctgtagatgtttgtatctgtgactcattgtgtccatgtgcaagaggccaggtgtacatgtggggtggtctgtgtgcgttagtgatcggaaatggtctgggaggtgtgaccctgaagtagcttagggaagaaatgtctttttcataactgcttcaggagcactagataagtgtatatgagcgaatgaagtgccctacagatgtgaaatatttcacgtgtgtggtataccttatgcacagttgtgtgactgccactgggcgtgtccacacagacagtacagtttacagacacgcagtggatcagtgtggctacaaatcaagtgccaggtgcccacactaaactatgggtcctcccacagcctagggaaattgctcattttttaaactgtccacagagtcgctgtcatctaggtcactggggagatccctggtggcagggtagtgactaagggattgagcaggagagatggctccatgcatcacagaaagtcattgttctccaagaaccctactcaacaaaaacaaaaacaaacaagaaccctactccaggtttgccacacccatgttttctggacccagagcctgagtctggtgagggtctgccagaaacaaccagtccagggacccacacattcctactgacaccccaactgtggcatgatgaaaaaagtaagccccgagagaccagaatgcattgccccaaggcacaaggccaggaagaggcagggtggggtcctagatactgacaatagcaagtgctgatactcaaccccactcatgcccacgggaacactggcaggcatacaggtggaggagccacccactggcatttgcatttcctggggctccatgggtgtgtcatctgggtccaactatatgcaagagatggcagagccaagaccaggagagagaaaagccaccagggtggaggaggcagtcccccctcctgcccactctgcccaccccaactaagtcccagcagccttcaggctcatggtgaccacagcctgtgagaactttcaggcccctccctgcaatctggacttcgcccggaagcctggataaccctccgcccagtatagcttcccaagcctgctcttcttgcccctccccaacccccagagagtattgcaaggacttgaacgcctcggacaacaacaccgagttcctgaagaacttcatcgagctcatggagaaagtgactccggactccaagcagtgtgagtatagggcgggacctctgagtgtaggcagggtctggggtcagggcaaagagaagggagggaggccagtacacaggtctggagacaagcaggcagggcctggaccaagggcgtacagaaggctttccccagagccctagagatgagaggcagggatgtcatggctctacattaagacacctttccatctgccctattccaggtaataacttccttcttcataacttgattctggacacgggcattacacagcagttagtggaacgtgtgtggcgggaccaagatctcaacacgtatgcaccaccacccaggctattatggctatgtatagcagggggctggggttggcccagaggccccggccttgcacaatagaagacggtgagcctgtgaccccatcttcctgttgcccccaggtacagcctgctagccgtatttgctgccactgatggtggcatcacacgtgtcttcccgaacaagtaagtgacacgcggcaacaactctccctgtctgggactttgccatgacttcactaccctgaggcctcagcactgccaagaccattgtacaccacaagctgccttatggtgtgcagtcgtatgcccactgagctctgcctgtcttgggtgctctagggcagccgaagactggacagaaaaccctgaacccttcaatgccagcttctaccgtcgcagcctggataaccatggttatatcttcaagcccccacaccaggactgtgagtgtctgtccatacccagcagcagatggggaggccttaactgagaccaggaggctgaggggcacaggctgcctgatagtcaaagagaaaagctaagccagacactgtatggggtgctataggcttaagctgggtccagccctggtttggtagggcccagttttagagtggccagtacggtcagccatcactcctgactgctctattcatctaccccagccctgttaagaccactggagctggagaatgacacagtaggtgtcctcgtcagcacagctgtggagctcagtctaggtcgtcgcacactgaggccagcaggtgaatgctgagactgaggtggggctggggcaatagtcaggatgctgaccaggcaggtagtccacataaccattgctctctcccacagtggtgggtgtcaaactggacctagaggcttgggctgaaaagttcaaggtgctggccagcaaccgtacccatcaggaccaacctcagaaggtatttgggcaggggaaggggagtaaggcccctctggtgtctccatggactcctaacaagcctgccactcagactggctccagcacctttgggaaggcaggaggtgccacagatggcctggggtaacagacatgagggacactggtgggcatcttacagcccccattctctgcccagcagtgcggccccagcagccactgtgagatggactgcgaggttaacaacgaggtgcgtgtgctctgactctgccctggatcccagcttccctcatccccaggctccctggtctcaactgtgactcctagcctgccccttagcctttccatcttgacacccctaccctgactccctcttcttgccagacctagaggagtgatgcccctcactccgaaccattggactgccagagcgtgaagtagcccgaggtgggccccctcaccagttttacctcccttccctacctcttaggatctactctgtgtcctcattgatgacggagggttcctggtgctgtcaaaccagaaccatcagtgggaccaggtaagggtcaggaagaaaatggaaggacggtgtaggtcagagccttctagagcatgccctgtgactatggatctctccctgcatccccaggttggcagattcttcagtgaggtggatgccaacctgatgctggcactgtacaataactccttctacacccgaaaggaatcctatgactatcaggcagcctgtgcccctcagcctcctgggaacctgggtgctgcaccccggggtgtctttgtggtaagctcctagaaatacccggagattaagggttgggaaacccgcctatagtgacctccccgctaacattttagagaaccagggtgatgtagaaccagaggcgactgtgctcctctctccactgcagcccaccattgcagatttccttaacttggcctggtggacctctgctgccgcctggtgagtcctggaggagaggttggtaaaggaggtctgtaaggcactgaccacctgctgaccgccggtactcggtgcccggtgccctacaggtccttattccagcagctactctatggtctcatctatcacagctggttccaggcaggtaagtagggtttaggatgcttggccccaaatctgtgtccagggcgggaacagatgctcggatcacaaggagagtggggcttagggctgcgccaagctgaggcggacgattgtctgtgggcggggctgaggcgtctgggccccgcagacccggcagaagctgagggcagccccgagacgcgcgagagcagctgcgtcatgaaacagacccagtactacttcggctcggtgaacgcatcctataatgccatcattgactgcggaaactgcagcaggtacttgcagagcgaggggcggggcatgttagaaggggcgtgatctgcggcggttgtgggcggggcggtggctccagggtggagcgaacctccaaggctccgccctccgatcatccctccaggctgttccatgcgcagagactgaccaacaccaatctcctgttcgtggtggccgagaagccgctgtgcagccagtgcgaggcgggccggctgctgcagaaggagacacactgtattcctgcccccgnnnnnnnnnnnnnnnnnnnnactcccccccacacccccacgtctttgccaccgcctccttgactccccacccatgcccagcggacggcccggagcagtgtgagctggtgcagagaccgagataccgaagaggtccgcacatctgttttgactacaatgcgacggtgagttgggggagcgacgctactgacatctgcgagcctgagccgggtggataccgaccgcttccttgtcttccattcctgcaggaagatacctcagactgtggccgcggagcctccttccctccgtcgctgggcgtcttggtttccttgcagcttttgctcctcctgggcctgccacctcggccgcagcctcaagtccactccttcgctgcctctcgccacctctgagcgacccacacacacacatcatacccccgccttggcctcctagcctttcgctcaccctcccattccacattccccaatctagagccttggccactctctcctgaaggacctgggtcccttcccccggagcctgtgccttggggcaggggaaccccaaagtaaggtgccatggtgtttggcactcaagatttagctcacccttgaactgtccaagtgcccgcagtccctagactcatccccgtgggctaggacaggaggccactagtactgatgccaaaccaggcctccaccgacccacctgcctggagatttcctctatgtaggcaaccctgccactgctgggcacctctaactggccctttggccccacccaagcccaaacttaccttctctgggggaaaaaaaaggaaagatggtaatagtgagagattcggggggcaccccctccccattggtttctggccctttcaggctacaaccccccagccttgcaggtgtcagaacagtctcacaatgacatcagtttagacacatgccatatacacttggatctctgagagcagaaacccaactctcactagacatacctgtgatggaacacacaaacagacacgcaccatggggggtggcccacaaagccttacacaaggcgagatgtcaatgaaggggttggcctgtgtgttccatctctgctcacctctgcctctactctgagatgcagcctggctgatcctcccatctctaaaactgaatgtcaaaccgtgccaaatgctggggggggggggggagacctctctgtttaacccctagccaccagtgtccccaagtgcccctcaccctgccaggtgctcattgtaaccatcgttcaccagtgtccggcccccagtaggaccacacatcactgcctgaactcctttggcagaagaaccccaccagacattgagacattgtattttgccttagcagggatgagttggtctctcctggctgggccatcccatccccaatctggttcttgcacactcaggcctaattccctctgcacacacacacacacacacacacacacagtccctgcccctaggaggccaaattacccctcccttgctgaacacacacttgcaccatgcacatgtctaaccaaccgtactgcacacacagaggctggacctgggacacatctctttacacctttcattctgtcatttctcccaaaggcatcgtaacttgggggccaggaggggactgaggggcaggggggaggggtgtagctgtgaggctcagatggactgggaggaggggggagggtgatacattaattaatggcttcgttaattaatgtcatgttgtttgttgctttctcagtgtgtgtatggtccatgcccagtgctggtgacagggtgggtatccatgatgtgtgcccagcctggatgtcagctgtgtcctgtgggggcgtgtgtgtaactgtagtgtagtcaggtgctcaacggagaatataaacaaaaaaaaagaaacaaacgtatacagaaaaataaatatatattttaagtttaaagacaaatgaaaccagacaaaacaatccccatcaggtagttgtccaacccccagctgggttcaaccctctcattacccacctgacctagctgtccccttactgtgggctgggggacttgggggccatttcctttgcccttttttttttgttgttattctattttgtacagacaagttgggaaaacaacagcgacaaaaaaaaagtcgagaaactttgtaaaatattgtgtgtgtgattccttgtaaaatattttcaaatggtttattacagaagatcagttattaaataatgttcatattttcacttcaaaccagtttctatccactgtgtgggccttgggttgaggactgggtggttatgaccacgggtggccctgaccacgggtggccctgatctctgagcactatcctgctctgctaggaggaaaagcttcagtcctgttcctcagaggttcctgccttggtcccactttgttgcgtatcaagtcacaagcctctaagaaagaaactgtcaaggggagagggcaaaaccccaccagccagagcctcaaggcaaggccaggactccaaaagaaagaccaatgagagatgctcagtcaggctgcgatccagccttggcatcagaccaggaccagacaagcagatccttcccctggatcgacaaacagatctcagtgctcagatacctgatgatgccaggatcaggccacccaccagcaagagcgcactccatcatgattcagggaggtcagaggccaggatagttccggcaaatattttgacagatgtacgtacatactcgcgcgcgggtgtgtgtgtgtgtgtgtgtgtgtgtgtgtgtgtgtccctacataggccagggtatgtgtatgtgtaggtctccctacatagaacagggtgtgtgtgtgtgtgtgtgtgtgtgtgtccctacataggccagggtatgtgtatgtgtaagtctccctacataggacagggtgtgtgtgtgtgtgtaggtctccctacataggacaggatgtgtgtgtaagtctaggtctccctacatagaacagggtgtgtgtgtgtgtgtgtgtgtgtgtgtgtgtgtgtgtgtgtgtgtatgggtatccctacataggccagggtacgtgtgtctgtgtgtaggtctccctacacaggacaggatgtgtgtgtgtgtgtgtctccctacataggacagtgtgtgtccatgtgtgtgtccctgcattaatcaagctgtggtgagaggagactaggtctccctatgtaggccaggctggcctggctgccaggaggggctgcggcacaagcacaggggtccgaggaaaactgacagcctgcagggaatctctcctcccactgtgttcttccagttgtcacacttggccacaagtgccggtacccaggcatccccccgcctgacccctgcattctcttcatgggaagaaaactaagccactaacctaggcagtcctgaactggatgctcgatctcttccactctgggggcaggagagccattcactctgtgtttctggaaattgtccagctaagttctcgtgatcttaagtgtggttaccagtagattcccatagcacagatgagcaaccagggaggagaaatgccttctgtctcgccaggtgaggcgacttaaagaaaatcagtgaaagctgggtctagtggtgcctgccccataatccacgtgaggtaagtggaggctggaggaacaggcgtccacggacatccttagctgtacagggagttctaaggcagccggggctacacgagaatcttcaaaataaaaataagttcagccaaagtctcaagtggcagggcttagatgtcccagttagtaaagagcctgctctgcaaacatgaagacctcagttcagtttctcaggacgcgtgtaaaaagtcccgtgcagtggactgtaaccactgcattgggggcgggaggcacgaagagtggggacaggcaaaaacccagaggtcatcaaacccaaagcctagctggacccatgagctccagactcagcgaggagagtcccttctcaaaatagaaggtaaatggtggtgctcctttaagtccagcactgaggaagccaaagcaggcaggtctgttggtctgagaacagtctggtctacacagtgagttccaggccacccatgactgctcgctgggatcctacagggtagaaaatgatagaggacaccatccaacattcatttcaaactactatacacatgtgcacacgagcacgtgcgcgtgtgcacacacacacacaggagagagaaacacagagacagacagacagacagagacagaaagacagaaagagagtgtttgtgtgccttttaggctggctggaggaaaacttggatactaaacatgacaaaggacattccaggattagccatggcgaggtttccctcgctcctctgcaggggctgacctagagcaacgcacgtctgaactactctcatgcccccaaaacagttcccgtgccttggaacaacacacatggtttggagtggggttgtcagataaagtccagtcaattctcatttgcagttaatttgtctgtttgttcctttgcttattgcttttgaaaagtctcacgtagtctagcctggcttcaaactcactctatcaccataaatggccttgatccccctgcctcagccatcccagtgctggattataggcaaataccaccacccagactctaagacatttttaaatgattgattgattgattgattgattttatgagcattggtgttttgcctgcatgtatttctgtgtgaggatgtcagatgccctggaactggagttacaaacagttgtgagccaccatgtgggtgctgggaactgggccagggtcctttggaagagcatccaatgctcttaacctctgaaccatctttccagccccagattctgataattttttaataaggtttttggtacttggttactatcgtccctgtggcccatggttattactgacagtgtcattataatttgtgctattactgtactctgaataaatttattcttgcttctataggaacaaatgagttgttttagttttgttttgttttgttttgttttgttttgttttggggtgtgtgtgtgtgtgtgtgtgtgtaatatggcatgggatgtccctctcctgaaaattgtttattcaaaaatcaaatctgattaagtatttgactctattttgttttgggttttggtttttagtttgggttttgttttagggagttttttgtatagcctttgctgtcctagagctaactctgtagaccaggctggcctccaattcacagagatcaaccttaaaggcttgaaccaccactgcccagtaactctgtattttgatttgctaagtcaaacttagcaaacactggtatatggcatacagtaggaaccctaaccccagacaaaaataaaaggtgaaaggtagttttgaacacacaggcagttgtactgagatcaatagctaaaaggggattttataataaagtcccttgtaatataattaatcacatttaaaaatatgcatatatatgtgtgtatatatatatgtgtgtgtatatatatatatatatatatataacaaaaatctcagggttggggagatgactccatagttaataatgcctgatgctcttacagagaacctgtaccccagcacccacatctggtggctcagaaatccagcttccgacatgctgtggcctctgtggtggcttgcacacttaacggcatatacacacaaagacacacatacatgtaaataaaataacttttttgggggtgggggagggtcgagacagggtttctctgtatagccctggctgtcctaaaactcactttgtagaccaggctggcctcgaactcagaaatccacctgcctcttcctcccgagtgctgggattaaaggtgtgtgccaccacgcccggctataaaataacttttaaatacatctcaaacaccctgttgacagccactatagcataaagttgagcctagaccaacttggcacttatagagagacttaaatatattttttctttaatgttcattggtgttttgcctgcatgtgtgtctgtgtaagggtgtcagaaaccctggaactggagttacagttatgagctgccatgtggttgctgggaattgaacccaggtcctctagaagagcagtcagtgctcttaaccgctaatccatcgctccagctcaagggagatttctctgtccagtggaatcaagtgggaaaagagtcgctgaagtagcacagccttgacccttattcccccttaggtggaaagttcatgtacaattacaagtacaattcgctggaacaaggacaatgtgaacgaacacccaatacaacaatggcaagtcgtttacacagttgccttctttgatcgttaagataggaagagcctgccatcatcatcatttttaaggctcctgaaattgcagcggggaacttggtcaataacacagtgactacaaatgactgaacaagcccatcttaggcttcacttgccagacgacagtttctggttagttcacacacgttggtacaactcatcagaaccgttcacattcttatgtacctgcttacaaagacactgctgtacctgtacaaatcctaaatagagccaatctcctccaaagaattgagcaagtgtgtgtggcccaaggcggtgctacctcttgaacccgcccacttaacacctccctttactgcatcaggaatactgatctcaacttccataactcctaagaactggaggagtaagcactgaaaactacaactcccaagctccctagcccgtacactctacgggaccggtcggcgcacagcttctgggacttgtggttctatgaagaaaccggtcggctaggtcccaaggactccgtatcccagcatgccgagaagccggaaggcaagcgctcagagggcgtactgccgcggccgccggcgggggcgcgcaggcgcggcgcccctgtttgtcggccccggagaggggaggaggtaccgtcaagccaaaaccctagcccagccggagctaaacgggcttgacttgggccggaacgaggcaccagttccccgcagatcgcagagtctcagagtggatggaggaagcctagccttgagattaacgctagcctggccgctgggccgacggaacccgcaggcaggcgagcccaagctacccagggcctaacgacaggtccccggcaagaagactttctcctcgctttggaactacaaccggatcaaaccggaaccagagccttcccacggaacagaagccagtgaagtagccgggcccgggcctcccgtcggggccgaactgggacgaggccccggggaggcccctaggccaccttccacacattcccttaagccaacgtccgccaggaagatgcaacgcgccctacctggtgcccgccaacatctgggggccatcctggccagcgccagcgtggtggtgaaggcactgtgcgccgtggtactgtttctctacctgctttccttcgctgtggacacgggctgcctggccgtcaccccaggctaccttttcccacccaacttctggatctggaccctggccacccacgggctcatggaacagcacgtgtgggacgtggccattagcctggccacagtggttgtggccgggcgattactggagcccctctggggagccttggagctgctcatcttcttctcggtggtgaatgtgtcagtggggcttctgggggccctcgcctacctcctcacctacatggcttccttcaacttggtttacctgttcactattcgtatccacggcgccctgggtttcctaggtggtgttctggtagccctcaagcaaactatgggagactgtgtggttctgcgagtgccccaggtccgcgtcagcgtcgttcccatgctgttgctggcgttgctgctactcctccggttggccacgctgctccagagcccagccctggcttcctacggctttgggctgctatccagttgggtgtatcttcgcttctatcagcgccatagccggggccgaggggacatggctgaccattttgcttttgccaccttcttcccggagatcctgcaaccggtggtggggctgctagcgaacttggtgcacggcctcctggtgaaagtaaagatatgccagaagacagtgaagcgctacgatgtgggagcgccgtcgtccatcactatcagcctcccaggcacagaccctcaagatgcggagcgcagaaggtactgggaacttctctaaaatcttggtagctagactgttggtgtggccacataaccagccattgagatgtttgctctatataggctggagagctacaggcaggtgttgggagcggcttcagaaaagggattcaggtcttggcctcgagggaactgaatgtgtaggtttctggactctgtgtacctcacaactcggaccactaaacctggctacagaatgcccagttacctttagtcttgcctcagaatttccaaattctaagcactggtccagtgatagacagaaactgtggctcttttctcctgtgatgggaaatggggaaggaggtctttgtccttaagtctttcccttcttaatgtaggatgattggggtattactaaatttacccctctttccgacacgtcaccaacggagacaggttgtgtgcctcactgcgagagcctcctgaccacaccaggcaggtcagagacctctgcatcatctgcaagtgcagcatcagtaatctcactgcattattcactgaacacgttagccaaggcaggagaatgctctttgaattcaggtcttactttctgagacctatggactctctacagtgttcccagctcccaggtgacccagtgtccagtgttcttcctgagactgttgaggaagtttctcggcaaccttattccttagcatttatcacgggctcctgcttttgctcccctgtgaaaggggttcctgacctcaggggaagaattctctcagctcattccccactgaggctctatagctgagtgtagcctccttccttgaaggagttagcagctggcaggtgtgggaaaacagccaggccatgctgcaggcctaagtttgggcactacagcttgagtttttggggagtgtcctaaagaccactccatcttgaccttacttagtagaggaaatgggctgggggctgagtttttaaggacaaagctgtccttagagctgttcagatgggactgggccagagcttgcccttgccccagtgagaagtcttgaattgtgacagttgactggtcattcagaaagcctctctccaggatcaagaaagtggatagaaagccgggcatggtggtgcatgcctttaatcccagcactcagcagaggcaggtggatttctgagttcaaggccagcctggtctacagagtgagctccaggacagccagggctatacagagaaaccctgtctcgagaaaaaaaaaaagtggatagaaaaggaagagtggggactggcccagtcacatggggtgggtgacaactcccagacaactgtcatgcaactgcatgccactctcggacccaaagggctacaaggaggaaagaggattccacaaagtgactgctggcaaggacatctccaagagtagtctgtggagtgacagggaagacctgctactgggctaggctggagcacattagtgttttcagtgcctgtatccctgctgcttttcctgtctattttcttggcgtggtagaaattttagatcttagaacgccatagggtggcgtgtctgcctgtagcagcaaagaggtaagccatcgggatccacggacacttcaccttctgtgggcaagagtgctgaacacttggaaacttgtccttcactgaggctgggtagcttggtgtgtagggtgtgtcttccttaaaagagtttacagctggtgtccaaggggtgggaaagcactcaaggcatgctgcaggccctacagcttgagacttctcgggtgtcctaaagaaaatttccaagggtattttcccaccttttctcaaaataatgcctgcagaagtctaccctgtggaaacaacagaccctgctctctggccttcccacatggctgtttctgctacaaaggctctgctaaggtctgggtggctttgagaaaagcttctagaaaaattgtcataggaagggccatgcaagttgaggctgcttcattaagagcccttcgctgagggagcctggtgatacaggctctaatcctgttactcgggaggctgagacgggatccaagggctgcctgtgctacagagctagtttgaagcagtatggacctgcctaaaaaaaaaagtgtttgttttaagggctggggacagctctgtggtggagtgctggccttcggtttaatccctagtaccacaaagccaaataaccctgcccttggaaatgacaccagcgcacgtgggacgcatttctagggactgaaacacgccactcctgacagaagcactacacccacccgtctttagctagcaaactcagaagtatccgtggtggctggcctgctaggtaggctgccaacatctaggtagccttctcagtctggatgccttgggtactcattcaattgccaaagcagatcctggcccaggctcttagacgcggcacggggatgggaaacgtgggatttggaggcaaacctctttggtaggaggatttggccttattgaagaaggttgcagagtatgttggtctcccaaacccagtgtaacctgccttttctcttctggctccaggcaactagccctaaaggctctcaatgagcggctgaagagagtggaggatcagtcagcctggcccagcatggatgatgacgaagaggaagctggggcaaaaacggacagtcctctgcccttagaagaagcttccacgcccccagggaaggtgaccgtcccggaatccagtctcatcaccttggagacagctcccctactctagaccactttgagtgcagttcttctactcccatgccttcccgatccgtctcggctactgcagagcactgactgctctgaggagagggaagagggtctgctgggggttcctgtggccttccgctgtgtctggacaacactaacacaggacccttgttgctacctggttctgactccagacaaccacaatgccaggtacggggtctctgagcagcagccagtgcagatccccatttgcagtaagattgtacctcagcggtacaattcctcaccaaggaagtggctgcagggacactggtgccacggctcctgggccagcccttatgtctgaaactggttgccaacagccccgagccaaggcaaggatttgtgtttgccaaaaatgttctggggacccagccagtgtgggtctgaacatccccgcccacccccagactgcattctcatcagggtttcttgtgcccttctgctgtggcagtgacaactgtgcctagccggggctgccacagctcccaggtattttctacaggaccatctgagcgggcagccaaacctgcttcacagtatcaataaagcggttctttgaggtctggctcctgggctccgtcagaccaccttgtgcagccctctcatctttatcagatgcaaagttaaatgtgttttctgggttctagggctcagttccattacacctccacctggctaagaatcccactgcccatacctcttgtctattaatacacacctgctgctgggcagtcttgcctgagccatcaccttagtccctttctccttttccctctcctcggtctactggggagaccctcagccagtggacctgacagacttctccatcagtaggtgctggcttaggcagggcatggtggcacatatctataatccatgtcgcaaacaaacaaaaccaggcgctgaaggcatagcttggatgacagaacacttgcttagcatttcagagctctgggtttgggtcccagcactacataagtggggcatggtatgggcatacatggtacatacatctataatcctagcactgcggtgaaacaggagaatctgaagtctgtcatcctaggccatgttgtgagttcaaagcccacctgggagacttgaaaccttgtctcagaaacagaaggcaaatttctcttgttcatgattctactttctttttcccttttgagacaggatcttactatgtagccttggttggcttagagctcacagagatctgcccgccaccacaaatgacca

SEQ ID NO: 168 - DNA, 5386 bp, Mus musculus
ccgccgccgccgtcccccctccctccccgcggcgccgcatcttgaatggaaacatggcggtgccggctcggacctgcggcgcttcttggcccggcccggtgcggaccgctcgcccctggcccggtcgcggcccccggccctgccctgacccccggggcccagcgtccgggcccgcacgcccgctcttgctcttgctgccgcctctgttgcttttaccgctgctcaccgcccccggcgcctctgcctacagcttcccccagcagcacacgatgcagcactgggcccggcgcctggagcaggagattgacggtgtgatgcggatttttggaggcgtgcagcagctccgagagatctacaaggacaatcggaacctgtttgaagtgcaggagaatgaaccacagaaattggtggagaaagtggcaggggacatcgagagcctgctggacaggaaggtccaggccctgaagagactggctgacgctgcagagaatttccagaaagcccatcgctggcaggacaacatcaaggaggaagacatcatgtactacgatgccaaggctgacgccgagctggatgaccctgagagtgaagatatggagaggggatccaagaccagcgccttaaggctggacttcatcgaggacccaaacttcaagaacaaagtcaactattcatacacggctgtgcagatccccacagacatctacaaaggctctaccgtcatcctcaatgagcttaactggacagaggccctggagaacgtcttcattgagaaccgtaggcaagaccctacactgttgtggcaagtctttggcagtgccacgggagtcactcgctattacccagccacaccatggcgagcccccaagaagattgacctgtacgatgtcagaagacgaccctggtatatacagggggcctcatcacccaaggacatggtcatcattgtggatgtgagtggcagcgtgagcggcctgactctgaagctgatgaagacgtccgtctgtgagatgctagacacgctctctgatgatgactatgtgaacgtggcctcattcaacgagaaggcgcagcctgtgtcttgcttcacacacctggtgcaggccaatgtgcgtaacaagaaggtgttcaaggaagctgtgcagggcatggtggccaagggcaccacaggctacaaggccggctttgagtatgcctttgaccagctacagaattccaacatcacgcgggctaactgcaataagatgatcatgatgttcacggatgggggtgaggatcgcgtgcaggatgtcttcgaaaagtacaattggcccaatcggacggtacgtgtgttcacgttctccgtaggacagcataactatgatgtcacacccttgcagtggatggcctgtactaacaaaggttactattttgagatcccttccatcggagccatccgcatcaacacacaggaatacctggatgtgctgggtaggcccatggtactggcaggcaaggacgccaagcaagtgcaatggacaaacgtgtatgaagatgcactggggctggggttggtggtaacaggaactctccctgttttcaacctgacacaggatggccctggggaaaagaagaaccagttaatcctgggtgtcatgggcatcgatgtggccttgaatgacatcaaaaggctgactcccaactacacactcggcgccaatggctatgtgttcgccatcgacctgaacggctacgtgttgctacatcccaatctcaagccccagactaccaacttccgggagcctgtgaccttggacttcctggacgcagagctggaagatgagaacaaggaggagatccgtcgcagcatgattgacggcgacaaaggccacaagcagatcagaaccttggtcaaatccctggatgagaggtacatagacgaagtgattcggaactacacctgggtgcctataaggagtaccaactacagcctggggctggtgctcccaccctacagcacctactacctccaagccaacctcagcgaccagatcctgcaggtcaagttgccaatcagcaaactgaaggattttgagttcctgcttcccagcagctttgagtctgaaggacacgttttcattgctccgagagagtattgcaaggacttgaacgcctcggacaacaacaccgagttcctgaagaacttcatcgagctcatggagaaagtgactccggactccaagcagtgtaataacttccttcttcataacttgattctggacacgggcattacacagcagttagtggaacgtgtgtggcgggaccaagatctcaacacgtacagcctgctagccgtatttgctgccactgatggtggcatcacacgtgtcttcccgaacaaggcagccgaagactggacagaaaaccctgaacccttcaatgccagcttctaccgtcgcagcctggataaccatggttatatcttcaagcccccacaccaggactccctgttaagaccactggagctggagaatgacacagtaggtgtcctcgtcagcacagctgtggagctcagtctaggtcgtcgcacactgaggccagcagtggtgggtgtcaaactggacctagaggcttgggctgaaaagttcaaggtgctggccagcaaccgtacccatcaggaccaacctcagaagtgcggccccagcagccactgtgagatggactgcgaggttaacaacgaggatctactctgtgtcctcattgatgacggagggttcctggtgctgtcaaaccagaaccatcagtgggaccaggttggcagattcttcagtgaggtggatgccaacctgatgctggcactgtacaataactccttctacacccgaaaggaatcctatgactatcaggcagcctgtgcccctcagcctcctgggaacctgggtgctgcaccccggggtgtctttgtgcccaccattgcagatttccttaacttggcctggtggacctctgctgccgcctggtccttattccagcagctactctatggtctcatctatcacagctggttccaggcagacccggcagaagctgagggcagccccgagacgcgcgagagcagctgcgtcatgaaacagacccagtactacttcggctcggtgaacgcatcctataatgccatcattgactgcggaaactgcagcaggctgttccatgcgcagagactgaccaacaccaatctcctgttcgtggtggccgagaagccgctgtgcagccagtgcgaggcgggccggctgctgcagaaggagacacactgcccagcggacggcccggagcagtgtgagctggtgcagagaccgagataccgaagaggtccgcacatctgttttgactacaatgcgacggaagatacctcagactgtggccgcggagcctccttccctccgtcgctgggcgtcttggtttccttgcagcttttgctcctcctgggcctgccacctcggccgcagcctcaagtccactccttcgctgcctctcgccacctctgagcgacccacacacacacatcatacccccgccttggcctcctagcctttcgctcaccctcccattccacattccccaatctagagccttggccactctctcctgaaggacctgggtcccttcccccggagcctgtgccttggggcaggggaaccccaaagtaaggtgccatggtgtttggcactcaagatttagctcacccttgaactgtccaagtgcccgcagtccctagactcatccccgtgggctaggacaggaggccactagtactgatgccaaaccaggcctccaccgacccacctgcctggagatttcctctatgtaggcaaccctgccactgctgggcacctctaactggccctttggccccacccaagcccaaacttaccttctctgggggaaaaaaaaggaaagatggtaatagtgagagattcggggggcaccccctccccattggtttctggccctttcaggctacaaccccccagccttgcaggtgtcagaacagtctcacaatgacatcagtttagacacatgccatatacacttggatctctgagagcagaaacccaactctcactagacatacctgtgatggaacacacaaacagacacgcaccatggggggtggcccacaaagccttacacaaggcgagatgtcaatgaaggggttggcctgtgtgttccatctctgctcacctctgcctctactctgagatgcagcctggctgatcctcccatctctaaaactgaatgtcaaaccgtgccaaatgctggggggggggggggagacctctctgtttaacccctagccaccagtgtccccaagtgcccctcaccctgccaggtgctcattgtaaccatcgttcaccagtgtccggcccccagtaggaccacacatcactgcctgaactcctttggcagaagaaccccaccagacattgagacattgtattttgccttagcagggatgagttggtctctcctggctgggccatcccatccccaatctggttcttgcacactcaggcctaattccctctgcacacacacacacacacacacacacacagtccctgcccctaggaggccaaattacccctcccttgctgaacacacacttgcaccatgcacatgtctaaccaaccgtactgcacacacagaggctggacctgggacacatctctttacacctttcattctgtcatttctcccaaaggcatcgtaacttgggggccaggaggggactgaggggcaggggggaggggtgtagctgtgaggctcagatggactgggaggaggggggagggtgatacattaattaatggcttcgttaattaatgtcatgttgtttgttgctttctcagtgtgtgtatggtccatgcccagtgctggtgacagggtgggtatccatgatgtgtgcccagcctggatgtcagctgtgtcctgtgggggcgtgtgtgtaactgtagtgtagtcaggtgctcaacggagaatataaacaaaaaaaaagaaacaaacgtatacagaaaaataaatatatattttaagtttaaagacaaatgaaaccagacaaaacaatccccatcaggtagttgtccaacccccagctgggttcaaccctctcattacccacctgacctagctgtccccttactgtgggctgggggacttgggggccatttcctttgcccttttttttttgttgttattctattttgtacagacaagttgggaaaacaacagcgacaaaaaaaaagtcgagaaactttgtaaaatattgtgtgtgtgattccttgtaaaatattttcaaatggtttattacagaagatcagttattaaataatgttcatattttcacttc

SEQ ID NO: 169 - protein, 1152 aa, Mus musculus
MAVPARTCGASWPGPVRTARPWPGRGPRPCPDPRGPASGPARPLLLLLPPLLLLPLLTAPGASAYSFPQQHTMQHWARRLEQEIDGVMRIFGGVQQLREIYKDNRNLFEVQENEPQKLVEKVAGDIESLLDRKVQALKRLADAAENFQKAHRWQDNIKEEDIMYYDAKADAELDDPESEDMERGSKTSALRLDFIEDPNFKNKVNYSYTAVQIPTDIYKGSTVILNELNWTEALENVFIENRRQDPTLLWQVFGSATGVTRYYPATPWRAPKKIDLYDVRRRPWYIQGASSPKDMVIIVDVSGSVSGLTLKLMKTSVCEMLDTLSDDDYVNVASFNEKAQPVSCFTHLVQANVRNKKVFKEAVQGMVAKGTTGYKAGFEYAFDQLQNSNITRANCNKMIMMFTDGGEDRVQDVFEKYNWPNRTVRVFTFSVGQHNYDVTPLQWMACTNKGYYFEIPSIGAIRINTQEYLDVLGRPMVLAGKDAKQVQWTNVYEDALGLGLVVTGTLPVFNLTQDGPGEKKNQLILGVMGIDVNDIKRLTPNYTLGANGYVFAIDLNGYVLLHPNLKPQTTNFREPVTLDFLDAELEDENKEEIRRSMIDGDKGHKQIRTLVKSLDERYIDEVIRNYTWVPIRSTNYSLGLVLPPYSTYYLQANLSDQILQVKLPISKLKDFEFLLPSSFESEGHVFIAPREYCKDLNASDNNTEFLKNFIELMEKVTPDSKQCNNFLLHNLILDTGITQQLVERVWRDQDLNTYSLLAVFAATDGGITRVFPNKAAEDWTENPEPFNASFYRRSLDNHGYIFKPPHQDSLLRPLELENDTVGVLVSTAVELSLGRRTLRPAVVGVKLDLEAWAEKFKVLNRTHQDQPQKCGPSSHCEMDCEVNNEDLLCVLIDDGGFLVLSNQNHQWDQVGRFFSEVDANLMLALYNNSFYTRKESYDYQAACAPQPPGNLGAAPRGVFVPTIADFLNLAWWTSAAAWSLFQQLLYGLIYHSWFQADPAEAEGSPETRESSCVMKQTQYYFGSVNASYNAIIDCGNCSRLFHAQRLTNTNLLFVVAEKPLCSQCEAGRLLQKETHCPADGPEQCELVQRPRYRRGPHICFDYNATEDTSDCGRGASFPPSLGVLVSLQLLLLLGLPPRPQPQVHSFAASRHL

SEQ ID NO: 170 - DNA, 161051 bp, Homo sapiens
tggtaggaagtggggatgaaggggttgaagaggaggcagtggtgatgggggttattattctggaggaaacatcaggaattcttacttgaaaatcacaagccccagtgacctggggcaagcccttttcatctgtacagtgaacatatagtccccaggggaggttaggaacaggggcactccagcctggggtctagcccctcggggcctacttatgggtaccgcagcaagactcagtgaggtcacagtgtggtccctgtggtcccaagcctgtgccaagaacaggcttaggggcttgaggggtgagcagagcctggggtaagaagaccctagagctgtccagctttctatgcgacagccagaccagcctgaatgggcagcagctaccctggcacgtccaggagaacagcagtagtgcgtgtgcgtttgttgggagaggggaccactgagtgcctggggcttacagggagctctgaatctaatcagagagatgtggctggcagggaacagcagggcagcctgggaggaggttacatggagttctgaaggcagggttcaacttttttttgtttgtttgtttgagacagagtttcactcttgttgcccaggctggagtgcaatggcgcaatctcggctcaccacaacctctgcctcccgggttcaagcgattctcctgcctcagcctcttgagtagctgggattacagacatgcactaccaagcccggctaattttgtatttttagtagagacggggtttctctgtgttggtcaggctggtctcaaactcccgacctcaggtgatccgcccgcctcagcctcccaaagtgctgggattataggtgtgagccactgtgcccagccagcgttcatcttattcccagggatctgacctgcaggactggcaggggtcacacatgccaggcctgaccccaggcctcagcgtgatggaggtgacatatgattacatagtcatttattcattcatcaacacttgataatgccctacactctgaggggtgagcatgcctggcatacccgttgccctggtgtttgggttctaccttccactcttgccccacgcctgactcactgccagtctttcctgtccatggcctgctcccagccaccccacagcagccagcttagattttcaggtaagaccttggtggcttgttgcaaactgctgagtccacatggcgatcctccctgaggtctctctcagtgagccttccccccgcctctgcctccctgaagctcctcctcactcatttggaaattaagacctcagcaagatggtgctttggagctgccaagcagggctcagcaaggccatggcagggggaggggaggggcttccagctggtgggaacataagtaggtaggagcctcctcactctcttctggactctcactagcctgtgcaggtacagcctcccaagcaccccttctggggcctggagcccagcaaaactctctgggaggagagagggtttagttctgccttgggggctcccagatctctagggtctgtctaggccaccgaggagccctctgctctctgcatttgtcctggcacctgccttgctctgccgacctcagtataagctccttatcagcaagtggaaaacagacacccaagatgggaacatgggccagctctaaccatcagacaaggccatggatggccccaagcaaggacccagggggacctgggacctggtctctactgcttactgggtaactttgggcctaccccaaacctctgaggctcagtttgcccaactatggaatgcagtaaggggtccacagagatcctgctttcctttgaaagggattctgtggctcagtcatctccagagtggccaggatgtttcctatctgcccatactcagggcccaggtggaacgggacccagaatcccgacaagccatagtcatttctggacttgtaccctggatagcctccctttccccaccccacacctttgggggcaatgatgcccctccctcagctagcccacctgggggcaatggtcccaggccagcccctgtcctgtctatcccccgcaactcccatccctgtccccatttcctgccatacgacatggcctgcatcctccctcctgagcagatgctccttatatttgcttaactaggtactacttcatgctagcagaagagagacaggagtgtttccaccaagcttggggagggacagccctgctcactttgccctttgtgtggcctgaagagcgagaactcccagccctgcctgggcccaactcttgactgtgcctccgaggcagcagagtagcctccaatccagaatgaccttctgcagcaggggcttacccattcccccttgggtcagcagcattgaaggtttcatggaggcctgggctggaaaatgccctcctccatttggagtatgttcaaggctggcagcctggcttctggggcaatagatccagactgagaggggctcttccagcatctacatccttaggttactccaaccagctggtgaggagccccatgcctccttgctctctgctcccccaccctagctcacctcaggcctggaaacaggcagaggtctcaaaggccccagctttagggagagcaatgaagactgcagatggggccatgatgctggggtggagagatctacacctgtgctaataggaaagctggattggttataaggttgagagcatcccttcccctccctgcccggtgtccaagaaactcaggtggaggggcctgagtgccagcaccaccccaaggaggcaggcgcctcaccaaatgcagcagggctgcctctcaagccctccagactcccatgacatgatgctcctcctggccctgcctccaccccatacagtgccatcctcccctgtaggttccaagaaccacctagcttcatccatcttccaggttcaacaaatggagtgctaactgcccctcacaggaacagcagccatcagttaaattaagtgacggtagagccaggtcctgccctccccacagctgcctagcagaggctaattccctaaggagttgatgagcagaagccaagaggtgctttttgcagaagcagaagacttgaggactctcctcagggtgcttccccgacctgtgtgctgaagaaaatacttccttgggtctacagccttgatctctcctgccatttcacatccatctacacttagggcagtcactcaagtgccttctgttgttaccaacaggaaggtggatggcatgaggtatggccctgccctcagagagcctcctctgaggaagcagacccctcactcctaacacagtgggcagagctggcttattcatgagatgcatcccaggccctctcgtttcattcagcaagtcgccaaaatcctctgtgtctcagttttctcagttgcaaaatgagcaagtaagttagggacagttgtcttcagaattactgacaaccggatcccaaccatgggcagggaagggaactgcccaggaagctctcccccaacccccttggtgggggaggctgggcccacttctcacccttctctgactggcctggaagggcagctatcagaggagacaatttgccatggccattccgccgaggtgttgatgggatgttgggcagagatggaaggctgcctcatcacagcccggcttagcctaccaccgacactcttcacttccacctagaggcagaaaaacacatcttgtggagagttagagctgctgtcagtgctggccaggggctctgaggagacttttatttattcggaaaccattcagacacctaatgctcttctgaagggagaatttctctcttttatttgtcctcattttctgctgccagagtgggatgaaggccttaggggaggggcaaaccagctctgggcccttgcactacacacatcaaggcacgtgggacatgggtggcaccaaggggcctcctactcccctgggcagatgtttgggccagggtcctctcaaagagggttctgagggttctgaggaccccagtggctgggagcaggtacagaggacggaacttagaccttagcctggagcctttgtctctttgcttactggaagcttgagaccagccctgcccctccatgggcctcagtttcttcatctataaaatgagcaggttgatcccgacctctctgaagaaaactccagactgtctggagcagctgccagtggcaatggggacagctgaggcaggggctcctggtgggagcagaccctctagctgagcagttgcgcccatctccatcctattgaagctgggaggacctgagttttgtgagggtagctgaggcagtgaaggtgaggccgagcttccctgtgctcacacaaccaatgatcaacttgtttctcctccttctctaaggacaaagccacccagggtcctggagtcccggatgcaggggtgagcaggctgtcctgtcctgtcactgcccagctgagccttgccccatgctgcctgtgaggctacaccacctctctccctgcctctgccaggagctcacttactcaggcatgcaccccccaggggagctgtgcctgcccccagggaagagggccagctcacttctgtctcaggcctttgctcagaccctctgccagggacactcttttttcccacctccagccattcatttgtccaagcccttcatacccttctgtgccagcttcaaggtccccttgtccaggaagccttccctgatcacctgggcctcctcagaacactgagggaccacttgctttttttcaccgacatgatgtaattatgtgtggtttgaggtactcaccatgtttttcctgtgtatcacattcccccaccaagtggggagctcccaggggccaaggatcaagcctcttatacttgccagaacctgctcaattaaccagcatcctcccttgctcagtcaaataatctcagttcagagactcttgggatgatggaggtctaaccagggggcttccactgccgtacagggaggcatgatttttccatggcccaatgctggtttatgggcttcccttcagaggccaggatggggacatcaagacccatggtttggggtctctgagactggtctcatccttggtcatagggagacagatctgggatgctgacccaggtgtccagactcaaagctccacactctgatctgcactaaccactgggcaggcagcctcaggcaagtctcctcccttttctgggcctcagtttcccctctttctaatgaggaggtcctataggttctgactgtttatgacctgggacttggccctaactttaatgtgcaggtagtgacagcttgcaatgtctgaaagggttaaactccagccccctccatatattatggtaaatggtactaaactgaccatcggttgatattgcgccaaggatccttgaaaaattattgacgtgtccagaggtagggtcctgtctgattgcatctggaggccactgagcatctgtaccatgctcagacaggggcattttggggaacattgcatccctgggtatccccaaggaactgatgagcgagccatggcagccactggcaggtgcaagtgctggtagtcccccatacgtggaatgaatcccagctgggggcccttggggaccaacaagtccagcacaaagcaggcagagaataggtaccttagagtgggctggatgaggcagggacagcagaacactggccaaggctggggccagctcaacggacccaggtggaggcagagctgggtaaacagggctcagaagggaaaatgttggctcaagtcatgctcacccaaaagaatgtcccctcctcctctccctaatgtgcccatcccaacctattcaacttgcaagactgagctgaaatccctcccccttttccaggaatatttccctgtctgcctgcatacacggcctgcccttcttggggatggctgagtctgttgtctccccttcgctaagcccttgctgaagtaccaagtcttccctcagggtgttagatgctttgggtcttcagaccatccctgccacatgggggtgtctcccactatatggatgaagaaatgggcttgcagaggcaaaatcacttgcttacacaacctgtgatgtctgatgtcaaagctgacacacctcatgcccaggccagaccacccttcctgggcacatccctgggctcccttgacatgccatcaaatgattctttgtttttgtttgtttgttttgagacaaagtcttgctctgtcacccaggctggagtgcaatggtgcgatctcggctcatggtaacctccatctcccaagttcaagcgattctcatgcctcagcctcctgagcagctgggactacaggcgccggccaccacagctggctaattttttttttttttttttgtatttttggtagagatggagtttcgttatgttggccaggctgctcttgaactcctgacctcaggtgatccacccacctcggcttcccataatgctagggattacaggcatgagccaccatgcctggccccaaatgactctatatgttaatacttcctgtgccctcccatggctaagcactgcatgaggcttggaaggggtgacaaggactagggagcctcagggctccgctcgacaagagtccagaatgggctgggcgtggtggctcatgcctgtaatcccagcactttgggaggccaaggcgggcggatcatgaagtcaggagttcaagaccatcttggccaagatggcgaaaccccgtctctactgaaaatacaaaaattagctgggtgcggtggcacgtgcctgtaatcccagttactgaggaggctgaggcaggagaatcacttgaaccagggagttggaggttgcagtgagccgagatcatgccattgcacttcagcctggcgacagagtgagacactgtctcaaaaaaaagaggccagagtgcaggtgtgtttctgaacccaaggcagaggccacagcatactactggccggggcaggaagcaggagggacaggaccaagaggaggaggcccatccagttgggggtggtagtaccccaggaaggcttcctggtataagtggtattaatgggctcataaatatcttgagttcaaatggtagaggtaaaagagggtgttccaggcaggaggaactgcaggagtaaagcccgaggcaggagttttctctgaataaggagctgtccagcctgttggtaaaaggtgagactgggcgcggggcaggctagggtgaaaatcttgccaccacaggcgtcctggatgttcctgatgggcttcctctgaaagggccacaagctgtggagtcaaggttgacaccagccccagtattctccccacagcagggaagagccaggggcctccaggacagaaaggactagggtgtgcagagatgaccttcctggctctggaagaatctaaatagaggctgtgcaaaccccgggagctggggcttgggacgggcctcgagtggcacaactgagcccatggcctgcttggcacatagtagtttctccctatggctctatcagtctcttctgacctgctgagctgacctcccatgcagaactggcacctaccaggccccctgtcagggtagcttcacctgcccctgccaccctacgtcttccagcacaggcaacttgggccaggtgggcagccccacatttaccaatgtgcctgccatggaagtccccctattccttgggaaggctcaaatttttctcccaagatcttaacgtgtggctgtagccagccaccaagagggctgaggatgttgtaagcctcaaaagttataattcgtaaacacttaccacttgtttactcttaattaccccccccctccttatttgtcttcctttaacggcctgtcaaccaaaatctcccgcctttcccttggtgccagcagcctcaattagatgcacatctgtggaggctagaactgaaatacccaactgccaaaacccacccactgtacctagactgacttcatgtgcctgacggcctgggcactttggggatagcgttgctaccctggtgttggagggcagggaggctggccctcacatttctcaggccactgcagagtctgccttgggaaggcgcccacccccgacagggcacccaagaggaatgatgtcctttatgatggtcccctggggccatgggcacaggtattatatgtccagcaaacaggtaagagaggatatcacaggccagccctaccttgggcatgaggaagacagagatgctgggaacaggtctcagcaggcagggctgggaaggcagctgttgagctcacgcttgtcgactcctgagcaggacccctgcccccctgccctcccattgtgtccagaggtggcaggggggcaactggctcagtgaggaccctgcttgtccccccaaagagctggactatcgtctcccatagtccatcaggtcccacctgtccaccaggcccctggcccctgcgttgccttcctctgatactttttttggggtctcatggtttgggatctgctggcaaacctgtctggcccctgaaggctcattcaggtcaagggaggaggacacttcaagaaatgaaggaaactgttccctgtcaagccctggtttgctgggattggagaagccaaggcaggactaggcagcaagggaaggctgtcctaggccctatttccagcccctacccctacccttttcagtccaggggctactattccctttcaactgcaagccctccttgggctgacttgtgagtgggtgataggagagccactgataccatgaggtggggcatctggacatttccgaaccatcctgcccagctggttactatccctcattcctcgtgataggccaggtctgtgggcagttattgctgagggggtcctgccctgtgtcaagttggtggggagcattctctcatcctatctgcaccagaggcagagctgggttccagggtaacttcagtagaatcctagggatggtctcccctcattgtgaatgcttcagtttaccaagagattctccccattctcacttcatcctggaaatgggagtgggcacccacacaagcattcacaagcgaggacactgaggctctgaaagggccacaagctgtggagtcaaggttgacaccagccccagtcttctgcccacagcagggaagagccaggggcctccaggacagaaaggactgggttgtgcagagatgagcttcctggctctggaagaatctaaacagaggctgtgcaaactccgggaactggggcttgggacaggcctgcacacagtgcctgttcagcccagggaagcgaagcgagtggctgcagagggctgcatcctgccgtccccagccccccacaaccgtacagccgtgcccaggtttccgcttagggaaccaggaggtccaggccctttctgccagcagccgggcgtgcaagcccccgacagagagaaatcttaaagatagctagagccacgggggctgtaagttcagcatgcctccttttctggtctccgctgaagctgtcactccaccattaaacctgtgactctaggccttaagcctgttgaaggtcgagcccccaaaagggtcacatatgctcctgccttgggccgcggggcccgggactcttcccgcgggtggggtggggaggagcggcagggtctgaggtgtgggggcgggggcgcacccggggcgctcgggtagcagctggggcgcaggacgcccgagccagtagggcaggattcgggctgcgcggggacgagaggcgcgcgggcacgggtgggcgcgtggccgcggcgggggcgcgcgggggcgggccagcccgggaagagagagggagggagggagagaagagggcggtgccggcaggttggcggcggctgctatttgagcgcaggtcccgggccgggcgctcagagcgcttggagccagcgctgcagggagatagcagcgcgcagcccgcagaggcgctgcggcccgtgcagccccggaggcccctcgcggagaaggcggcggcggaggagaggccgagttaccgcccgccgcccgcgcccccccaaccccgccgccgccgccgccgccgccactgccccccctccccgcggcgccgcatcttgaatggaaacatggcggtgccggctcggacctgcggcgcctctcggcccggcccagcgcggactgcgcgcccctggcccggctgcggcccccaccctggccccggcacccggcgcccgacgtccgggcccccgcgcccgctgtggctgctgctgccgcttctaccgctgctcgccgcccccggcgcctctgcctacagcttcccccagcagcacacgtaagtggcctcggccggccgcgagaccccggccgagccttgcgccccgctctgcccccggtccgcgctactccttccctgcgctccgcgccagggcagaggcgctgggtccggctgcccgctgcgcccgggggcgacggccccaagccccgaaggctggcagccgcggtcccggcgctctggctgcgtcgcgaaacttccccgcggtgcccctgcttcccccaaatcccccgaatgaggcaaggcaagatcttcaagccccgggaggagttgggggggggcggtccgagcttgtcagctgattcccctgccgctgacccggtgagagggaaacccgggttgggtgagaggggcggccagcgacccctgtccggcggagttggagccgcgcatctgccccacgttccctccctggtgggaatccggcgctttacagccagaggtgagggacatctccacacctgccttcaagggccttttcctttagtggggagctgtatgctgatgatgcgagcaccttcttgctgtggccagtgccacagaggcagtgtcccctgttcttggcccccctccacctgaggagagagtaccctggagagcccagttgggaggtgaaggcgttggggtccgggcagaaggtgaatggtgggaaggacccctgcctgcgcctgctgctgctgccaacagagtaatagcttctcctggctctgccagcctccgcaggttttttggtccttctgagccttctcctcctccccaagagccagcaaactcgggctgcctcctacgggtgagcttagccagatgtgtctggggctgggagtggatgttcagtgcatgtggcctttaggacgtatcagtttcctgacactgtgcttcagccctatgtcagtgcccagaccccctttggggcacggtgaccaccttgcttctgttatctgtctccgggtctgaggagccacctgtccctggactccttcaccagtgtcctggcctggagactggggcatgagtcgtcgggctgctggtggccaaggggaagggtctggcctcggggaaagggagaggctggctctgcgtcatttaaaccagctctgcccaagggtaagagcccctggttctgccacaaaacctgccgactccagttcgtaggctctctaagatgagggaaaaacaaactcaggaaaaccgcctctctgggtctctctctccgtcttgtcgtctctctcattgcacagcctggctgtgctcaggcaggtgatcagttggcaaattacaagtgccgcacggacgtgtcctctgtcaaccgtctggatttttcacatgtgtgtttgggggttgcccagggagaaaagaatcgaatggaagttcagggctggtggatgcgttattgtctttcatttgccgtgatggaaatggacttcaatcatagtgcttaaaaaaagcaaaagcattatttttttgttgttctttcttcctcaaagccaagcacgagccaagccacaattatttttttcttagccgtttcatagctccttgagtgaaggtttaagtggatgtctctttccacctctcccgacctcactccctttccctgcaacgtgcagttggtcagatggcttctgggcctgcacgagtctcctctagaaggccgatgtgagaacctgaccagagtaggcacctatccctctgtccccagccagaagatggcgaggcgggtgtgacggcagcgacacacttccagctggacgctgttgtcgatatagttggagctaatttgggggtttgggacatgtcttgcaaactgtaattagagaatgagggtgggggtggggtgggggctgtgccgctctgagggtccagggggaggtgactaatggtacaacaacacagagggtttgctgtgacagccagtgcccttcagctgccctggtcccgcagacgaggatgcacattgatccttggagggaggaaggggcccacacatgaccatggccagtggaattggtgcttttgttgaactggtaagaaaggtttaggctgttgttcgggccagaaggttctgtggggctgctcagggatgggtgacctcccagaaccttctgctgggtcagtgtggccaggctgggatgacactttgatacaggtggatttccaaggaggagagtggaacccagcttcatggcactggagtgacaacccctcagtggggaaggcccctgatgagcaagtcattttctcattagtgtctgccagtgcacaggggcccagcttcacaagctgctggattttaagcaagtgtgggtttggggtctgctagctatgatttctgcaatcgctctggcagcatggctctctgcccaccaggcaaaatggaccaaggctgctgctggattgagaagggcagaggggttactgctgaagggaggacagggcttcagggtttttttttgggcggggggtgggggggttgggctgtctcaccttacctggacctggatcagagtttcaaacaaggaggaggctacatgtttgcacacatgtatgcacatgtatgtgcacttgtccggctgggtgtgggggacctgagtccgagcacacctttcacctgcctcctttttccagttatgccctccccagcatcaggccaccaccgccggctgaggggcagccctcactgctttgcctccccttgtgtctttccctccctcttcccctgtcccccttcttcaggtctttcatcgagctgtacctatccttccctgcccgcctcttttgtcctctctgctgggcctctgtgccctgttctccagtgcccccaggtttctctgtcccctcctctgtggagtcctggctgagtgctgggtggagcacccggctgagctggcccacctgactgcaccctcttagcccagctctgctccagcgatggtgttggccagcgtctcccttcctctgagggtgggcagaagcagtgaggggcctgaggggtttggaccaccagcagattaatgacaaccagagtacgtgctcctctcctgagtggacacatggggagcagtgcctacaacagggcatgcgtcagtgtagctacggttaatggtgggtgacgtgtgtctgtctgggccttccagcccctgtctccatctccctgtggctctccctgttggagggaggcagcatcactcatctgggtcccccatcttcccaaaaacctgcctcagcttttgcaggagggagggatgaggcttcccagccgctgctgctgtcaccgagatgcagagctgccaggtgctcacagccctcctggtgtggaggactttggggggacccttggctgctgttcccctggactccatctttatcaggcacctccttttggtcagctgtgccaggttaacccctgagaaaggaggaaactcattttaggatgagtcccctcgtagtctgcaggtgaatctcactccagattctttgtcacactcatgtccccatggagagactgactccagagtaaagctggcctctaagtggacttctgcagaaagtatccccttctcctcctgcctgtgtgcaggtgggcactgccagctcctggcatctcagatgtgtatgggtggacactgccagctcctgggaggatgtagtttggggacatgctgggtgtcaggtgtagactttgcaggctccattgggatgaccttgccttagtttccacaattgaaatgatagaatctgcttaagaggctggtggtgagaattaacgggagaggatgccgcctctagtgggcagggagggctccgtcaggtgccatggctgccactgttaacattagcattaagcccagatgttgcagccgggcggtagccagtcttactgcgagacccaccagtctccagggctcccacgggctaggtggccgcctgtctctctactttgctcatgctgccctgccatgactgtgctcttttctcaggtttagatcccctccttcaaggtctcacacccgaaccttccagaggccttcccatcccagctctgggctgtgccactctctcaggctgtgcccacccacatcagattctacctccttgaggaagacattgggccacctccctccctcactccctgcaacacagcttgactgtggtgggggacgtctccaggctaatggtgatctcccttactgagcccaggccagacccctcacccacattagtgccttgacctcagagcccgtggtcatgtccatcctccagatggggagactgacctcagaaaaatgaagggacctgcttaaagcccacaaccatgagaggcagggcaggggaaaggatagatctgtcagacacttggctgcccagccagagggctggggacatctgggcagtgggcccaggaagtggaggggggcttgaagcctgaatctctgggaagaaaatgaagaggcctaggatatgagagctgggcctgggacttccagctgtaactttgccctgtctgtctctctttcctcctctgggtctcaggcaaccctgaggggccttccttggcatgaagctgccttgccagccccagtgcttatagccccagtgctgacctccatctacctcccacgtatacacaggccatcatggagcacccccagcccagagctttccttcccccagctttgagttatgggccaggcctgctctgtgtggaggggtggaggagaggaggggcttcatctggagatgagatgccatttccttctccagattccagtctgattccggagagaaaggtcatggaggtgggggtggggctgggggttgttcatggaaacctgaggctggctcctttagtcccttggcagttttgccaggtctgaggggacttcacagggctaggatcttatagatgctgggggagcctcatgccatccggatgggtgggacttggggggtttgggaaccagcgttcaagggcttgttgctagggaactctccaaggggcagctggaggtttgggagtcaaggcaggtgggctgagctctgtctggcagggcgatgttgcctgtaagataggagtggtctttctctctcttcccccttccagccacctaccccactcccgtgcggagatttgcctccagacctggtgccttgtgtctttaagtgactgggctgtgggcctcaggcctggggaggacatgctggggaggacatgaggggctttcccattgctggctacagccctccagccaactgggaagattctcttcatgtcaggtttttttttcttttcttcttcttctggtgcctactgtctaaacaagaagctacagaatcaatattcgtattccccaagggaagtgtgtgtgtggtttttgcttttttttgcttcccttcttctcttgtcctgtggaacctgaagagcttccagagctgcctgtggctaagggcagaaggggggccagtgcaggtgaccacagagattgagatggccctgctggcttgcaggtccccacaggggtctcttggggcctccctaaaggagtcaagattctgtcattcaaatctacataaggtcaggacctaaggggcagactcagccaagccctgccctgccactgtgagactcaggctgttggcttggtgtccccggtcctggtcccgctcctctcacctgggccctcacagtgcttttccttctgcatctggtctggacctgctgggtccccagccatcactgttacccgtgactgagcctggtgaggggagagcctcacaaaccaggagactgtctagctgggattaggtggggagaatattcacaaaggagttctgaaagcccccatcttaggtgaggaggcctctgtcaagggcaagcccagcctaatcttctcagttgggtagcttgcttggtgaccttggacaaaacccctcctccccctgggcctcagtttcctttcttccaggatccttccaactctgacattccaatgccctaagaagacagatctggggtcttcctgctcctctccacgccctgctttagctgtggccgctgggccttgtctcttccagtgtgagggtgcctggacctcccgtcctcctttggccataccttgggtgtctcatggctgcttttcagattgaccccctttgagttctgatcagcctaattgtttagcagagggggaggggcatgggaagcctttcctgctgatcagtatccatctttcccaccttggaaatgatcctcattcaacaaaggggaagaggtgggtgaaaaggctgagaagtcactccttctgcctgtcttttccctgcccctcttagaccctgggcccctttcttcccctttgatgcctgccttccctgatggctagttctttctgaacaagccccctcttcgtgtgcactgagactctgccacacctctcaacagctgtgtgaccttgggaacttccacagcctctcagggtcttggagcctcatctgtaaaacagggcttccgtggctgtactgccacatagggttggggtgtgatagactgtgagggatgggcctggccccagggagtctgtgataagggcatgtggatcccgactggatctagggggtatttgcagtctagctgggcctgcactccaagtgccagccactatcccctcatccatagcacccagcacccatccaggccctacaggcacttgggacccacttgtggtttgtgagtctttcctcttgtgtttggctcttgcctttgcctgtgtgcacatgtcagcttgtatgtgggcgtgtctacacctgtgtgttcatgtatgtgtgcatgtgtcagacgtgttcacatctaagcatgcttgtgcgtatacccacttgtgtgcgtgtgtttgtactcacacatggatgcatgtgtgtagatgtgtgtgcatgggcattctcgtgtgtaggcagcagtaggtgtgtgcgtgtatgtgcatatgaagtcaaatgcgggcatgtgcttgggagcctatgtagtgcaagcacacgtgtggtttatctctgcagccagaatgggctcctagtgcccaccttcaccacctgcctttgaggttaatgccagggctcggctgggcaaacactggcagtgggaaataaagcatcctgattgttagggccagtgttttgcaaacttttatgttagaaacagcctgagttaaagctgagctggaaagtttgatcttctaccaactggcgtgatgacagtctgcaaaggaaacagaggctgcgtccttgtaattcaaatttttgcaaattgaatggtatttacattcagtggaggacttgggactcagaggagctccgtgagtcctttgtgaagtgaagcatctttgcaaacagcccttccccgcgtggaaaatctggagggtgggcgtggagcctgggctcaggcagagtgggaagctcttgctgtgtgaccttgggctggcacttttccctttcagagtgggtgcttctcatttgcacactgaagggcaggagactggcagcccttgagtatctgctgtgggtttgggtcctccccgcagcaagacactgtgggcacgatttgggctgtaaaaactttggcttgatgatcccttgatgatctggagggatgattcctccacatgttctccatctggagcatctccagcgaagacacttccttcaaggatggatttttgtctactgagtcttcataaataaggctgtccagtgatgccctgtgatgggccctggccccagtagctgtgtggacccagttctcgtgggttctgttgtctgagagttttgctttcctggcattttcaggacgcgcctgtgtgttgtcagtgctgcgatggcccagggcccttgggattttgggaagtggctgtgaggggctcaggagcctacaggccaggaggggttcctgtgggggcagggagcctgggtgcaaccgtctccttgggcattatgggctttgcatgcgtccctgacttggaaaggacatgccacagccacagaaatccctgaggtcctgataccaccatcatatagacacggaaactgaggcccaagatgggggaagggaaccttcaagccccacatatctgtggctgcacatactctgtgggcagggcccagccctcatccctaatgctcagtacagactgcggggagggcgactccctatgcagccttcctcgcactgatgtacagctgtttctcttaaataaaaatatccagccgggtgcagtggctgacgcctgtactcccagcactttaggaggccgaggtgggaggatcacttgagcccaggagttgaagatcagcctgggcaacatggcaaaaccccatctctacaaaaaaatacaaaaattagccaggtgtagtagtgtacacctgtggtctcagctactcaggaggttgaggtgggaggatggcttgagcccaggaagttgaggctatagggagctgtgatggtgccattggactccagcctggacacagagtgagagcctgtcatttataaataaataaataataaataaataaaatctatggcatgggtcggggggcaagttgaggtctgctttggcaaactcgaagggcaagatgtctatgtggtgtgaggccccaactccttgggtttctgtggggcaaactctgatgtccctgtgctgtttcagagacataaaagctttctgggtccccttgggaaggacaactttgtcaccaggcagtgtgggcttggaggggctggcgtattcctgagatggtagaggcccatgctctgcctcgagtttccagcctgacgtggcatttcagtcttgatcacttccttccacagcccgtgttctcctcctgctggccccgcctaaaacgctgcatttgaagccttaaaggtcaggtctggtgctgccaccagttccagcaaacaaacaactaaacaacccacccccgccctgcccccacttcagttatgagaaaagagaaggagctggcagagcaggcctctgtgctaagggcccttgcaaatgggcatttctcctttctctctgtgagctgagtccgtggtgggtgtgttagggccctgggagtctttgtatctctccttggaccccccgccaggcttgctggagtgtctcccttttgggctagctgggaccttgcaccccagaaacctgccatgggcagagccccacttccctggctagcccctgaggccttgcctgggctgactccagcctccggccctgggactatctgggacacttgaaggtcctgggaagagctctggcctccgcacctctggctttcgctcactgctcaccgtgtccctctccaggctgctggcttcgcccagggccctggggcaggagccttcctgaccaacaccctcctccggctccctgccctttgtgagtccctcctccagacccgtgccccgcctccagctctgtgccgggtcatggggcccttgaggagtaggcattgagctgactgcgaccccctcaagatctgagtctgaggagcgcatttggctgccaacaagaggctgcttctgtgcttatcatgtgtggtgggttttcctcatggtgggccctttatcccctgacagggagccaacaggtgtgtgatgcggctgctggcaaagaccaagtggtcacctgtgctcagcctggtggcctcgcttttggtgtaactgtctgtccttggccaacttactgcatggcaacaagatggctgccacagctccaggcatcatctgcagacccaggtactaggcatggaagagatgtctcctctgggtttctcttaagaggggaggaaaccttgcccagaagcccccagccgacttcctctcacatctcattggctggcactgagtcacatgcccactctgaaccaatcactggcaatctaaacagtacactgtgattggttccggctaatcaggatttacccttgagccgaggatggggtcaccttgggctggaggtggagattctgcagaaggcagggagtgatggaggatggggaagcagtgtcggctgcagggtcagaggagaggcttgagggtgggagttggggccaaggaagaagcaggagataaggggatgggtgaccatgccaaggaagtgtttgtaaaggaagtagttgttttaaccacatcagtcactacaagctgggcccccggtggtatatttcacacatgttaggtcagtccatttttatcctactttcatagatgagaaaaattgaggcttagccaggctaaatgataaaatcacacagatggcaagtggcaggggcaggattccccctagtgctcgggtccaagcactcagccctgtcccacacatccctcctgcatctcacctcctccaggcaacccctagccacaggaccttcagggtgtccctacactcccatgatgttctgccatgcatctccctctgcagaggctgccctactgaccaggctgacgtccttggagggtttatttctcactcggcctgtggcgcctccaggttccttggaaccacccaaggaccagaagtaggagatttttggctcccaatccccctcccagtagaacagccccacccttacttgtgtcatggatgtgggtcagtgagaactgtgggaccagttggtcccgtttaactcccgtgtggtacagatggggaaaccgaggcctggagagggacacttccttcggcctctcagcacttgaggcatagactagacccaaacctggggtttgggggagcagccactgccctcaagttgccgtgctgtgccagtgaggtttggtcagtcagaggcctgaaggaggccattcaggccacgtcctgtctcaggcagggcctaggcagactatttaggacaacagcaagttgcgggttcagatgacgtctgaagatagtgctggcatgagtgggctaagaggatggccagaggggcatgtcctgctgctgtgaaacagcgcagctgacctggccttagagggccacagccacggacgtaacgcatagacatggccgtggggaaggcccagacttggctgggtgctgcctgtgagacttcattctcatcttgcggggagggtgacttcagggtggggtgtacttgcctatagtgggggtatacttttgcctactcactgcagaggactgggtgtcattggtcagcacccaatggtgaatatgatgagatccatgctccactgtggccaggaacctagcccttcccattactctctggctctgttccctgcaccaatcctgggtctgggctggacagtgtccaggagccagtcagccaagggcagaggtcttggggtaagccctgggctttgtcctgcttctggattgggtacccctctggccagtgttccccacctgtcacatgaggaaagagggatctctggggctgtccaagggtcagggaaaggaagaagctggcctctacaggccacggctgtgagtcccccgactgatagtcctcccctgatccgggtctctttctggggctttctcccagtcacatgctggaactggtggtgctgtcgcctgttctcacagagtagtcaggcagggcagtctgaactcactctcaattctcccacctctccatccttcactctcctttttccgccccactccatgcccacctcaccccctgggctgtgcctagcagtacgtgggcagagcaacttgaggggagggaggcagcatgtttaattgtttaagccacaccttggctggcgcaggccacagaagccctaggggcttgtacagtagggtctgtgggcctccccttggcccttcctcttccagtctcctcctaacccgccttagcctcactgtgatagtctgggcaagcctcctgccgtcctcctccgagcctcagtgtcctcactgttctcagcaccctccatagaaagggatccttctgcagctgacagtggtgctccccctgccacctcatctgcataactgtcatctctgttctgtcctttcctgtaaccggtgcttgtggagacctcagcaaggaggctgcttctgatgggcacggggaggggcacagagtgggatctctgccctcagaactgagtgcccaacagaacagaagccatctcattccatgggggcttaacaagcacctgcaagcactcagcatggaggaagctggggagaggttggatgggctgccgagggccctgccaaccccaggcaggacccacctgttgtcccactgacctctgcctgtccttcggtgcttggcttggagtcactgtcccctgaaaccttcgctgacctccttgtctgggtcagaggcctcctagcctgcttcaagcccctgtcctccctattcttgtcctgaaatagaccttgctgcctggctgctcagggactatgtggctgggaggggtgggggcagtggctggttgcccttggctggagctcccagctagcatacaccaagtactcaatccatatgtgctgaacagggagcccatggtctgtgcaggtgtccacagagccaagctcgtcatgactgtggaaaatggagcagcctcttacacagcagcctgggacagagcctggctttgctggagccagagggcataggccactcccacatatcttcctgtggcttttgcaaggagttttcccagcccaggggctgccaccaagggctgctctggggagggaagtaaagggggtgtccagagacccactgacctgtattatttaatggggtgggaggcagggtccaggcattagcatgttttctagagccccctcttccccctaagttgagccaaggtacagaactgtggccttaggggataggaagataaacacaggatcctcaccctctgcccagcaagggggcactgaggctcccagggttgggggatggtgtatattggttctgagcaatgtcctaaccatggtatctatgggagccagctgaacccaaatgcctgtgcatgcagccagttgccaaaatctgcagcttgtcccagggagatcacctggcttcccagccgtctgccccgctccttccaaaccgctcctctgcatagacatttgcccatgccccatctgccctgccgcccactccacagcctgcccatctttcaggacctgcttcctgaccatcccttccccacctgaatccactcccacaccttagctgtgtgttgccctgagtgggctctggggtctccaagggccaactgggtccctgctcttgggacactcagtccatgggggagataaacagtgaagaagacatgggagtgaggccaaataaataacaccatgcatggttggtgctccaagcagcatccaaggggccatgagacatcctgctccaggcccccaggctcccctgccattcccatggccctgggcctccccagtcagggtgtggaggtcctggggagatcacctggacacatctttctccatggataagccattgatggggggacgaggtaaggggcaggagttgagtaggggagaggcttgccttgcatatagatccagccccagccccagccccagccccagccccagccccagttttggaggctcccggcagccccaccgctgtctttctgatgcgcttccggggctgctgctcccctgggcagtgcctcctagcacttaccatgccttgggctgcccagacctcatgactatggccctgcctgtctggcgccccatagccccatcttccctggcacagaacagctggggagggggttgtggggaacaatcccaaaggccattaagcctagtgatttacacggttcctgagccagcgcggggggaagtatgtttcacaggtgatttccagactggtggcatatggaggaggccattactctacaatgaagaaggatggggacttcatggggccatctagaaggccctggagctgtgggccctgatgcatatgcctgctgtgtggtagaaagcctggttctggggattataaagggaaccccatatgtgaccttgtttgtgccccagttacctcatctttatgatgggatcacatttcctatgtttcatagttgtaaggatggaacatccagtcattcagccagcattttttgagcaccttctgcctgtcaggtgctgttctcaggagatgatgttctagtgacaatatctgtgtcagaaaacaccaggaaggacgtgcgcggtggctcatgcctataatcccagcactttgggaggctgaggtgggcggatcacaaggtcaggagatcgagaccatcctggcaaacagggtgaaaccccatctctactaaaaatacaaaaaaattagccaggtgtggtggtgggcgcccgtagtcccaggtactcgggaggctgaggaaggagaatggcatgaacccgaggggcggagcttgcagtgagcagagatcacatcactgcactccagcctgggcaacagagcgagactctgtctcaaaaacaaaaacaaacaaaaaaaaaacaccaggaaaatggcgaaagctttgcacttgtgggcacttcttgctaggggggtggtagaggggctgcagcaggcgggagctcccatggagctgggggaagaggtgtggggggtggggtgggtaataacaatatccccagcctctaatgtttgttgtgctgagcctcagtactctctgctgccctcaccctggggtcaagattgcaagatacaaagtacagggcagtgtcaggatgccggggggaagaggctctgcacccgggcccagttgtgatgggtactggtttgtttctgtggagtgaatgaatgaatgaatgaatgaaatcagctcctgagagactgagctcccacttaaagaggcccagcttccctgggcacagccgtctcactgcccttccatccagtgtgtggaggtgctcccatgtacttgagggtaggaattctgcaggcctcggtgtgggagcagcctgccttggtgcccacggtcggtctgtgggtgctcacggggcatcactgtgtgtggagcccactgctgggccttgcatatgttgtgccctccatttggattgccctcctgctctgtggtgccaccttcacctggccagtccctaggccaggtcaggccccttcccatgcatcccatgcatcccatgcatcctgtccccaaggcttgctggactcttcttctcatcaggccccaatccggatcaggtatcagcttcctctgcttggattccaagctcccaaggacaggcctgcatctgccctgcttgctgccaaatccctcccaggtgcccatagtaggtacatggttactatcggaatgaatgaatgagtgagtgagtgactaggtggggagtgagcgagctagttgggaatttacagaaagttggaagcacctgcaaagcattttgccagtaatttgacctgctggttcagccacctgcctctccttaagccaatcatgaggctcaccaggcaaggtggcttctctcggattggggaggctagaaaggtggggtagctggggctgcactagaagccccttgcttgtgcagctgtggatccctcacagcctgcagaggggatttgctttgctaaaggagtcaccacagagcacccgagagtaacaggttcatggcgtgtcaaggcaggttgaacactcacattccatttacatacagcttggcgcactctaagggtccaggcactagcaagaagcagatcccagaggaagtgggcattctccccatacctggctcaggctccctggtgggggcattggagggagctggggctctgccctgctggccaacgttcctactgcaggatagccctgatagggtataaggaaggacttccccattgcactcagctttggcttgcttgtggaggcagtgagttcctgaggtagcccccttctcaaagttggaaaaggctgtatacgaggggcggctcttacctgcaacctacttcctatttggccattggagtcccccttgaggttaaggaggcctgacagcctaggggacagggccatggctgagttgactgggttcagattgtggttcagcagtgtggtctcgggcaagttgcaccatttccacaggcctcagagtgctcatccgtgaagtgggcatgaactggcctgcgcctggccgaggtaccatcgctgcagtggaaatcacatggagtgcccagcacgcaggccctccgcgtcagcattgcctttccctggtgcttggctgcctgctgaaatgggggcccctttcccagccctgtcctccagcctgtcttctactgcagagtgaggtggtcagggcaggccagtctggtaggcggaagatgttctggtaaatttatctccaagtgtttccagaactctttttggccaggctccaagctaagctctgtaggaagcttgatgatgggactaggctgcagccccagcctaagatgaggcttggtaaagtgtggtgagaactgtggctttgagaagagggtaggggaaacctaggaaagcttcctggcagaggtgacttggccaggtagaggaaggacaagcccagagaacaaagctggccctgatgggttgagttctgtcttcgcttggcctctcctctgtacatggatgtcctcggggggcctgtgagcttccacagaggattttgctctgagggggaccttgagggggtctctgtcttcttcaaggcaggaggccatgttgaggactcatacagaggacagctatttgtggcttagcgaggatttgactcatgctggggggtggggaggatgtgcaggaggggagatggggatgtgtgaatcacagaatctgaccagaatggttggtgacacatggacagggtctgtcctgccacctctagtccagcttcagctcctggtgtggggcaggaacagaaggctgtagctcctgggttcctccctgacccatttggtgacctccacaggtgtcccaaccctactgtgctctctgaggtgaggcctgggcgtggctcccccatttcagcactggctgggcacacagggactgcagcagtgttcacctcctgagggctgatcatgctgagcctcagcttacccgtttgtgaaatgggcccgggcaggacttctgttcccatcgtgcctgactacctggggaatgtgctggggagaggaggtgtcgcagaccccaaaatgcccatagtctgtgtcagtggccggggtgggtggttccaggcttcctggagaaccctggatccacctcctggattcctgtccccgtgcccctggtctggaccctttgccttgcccctgggaggcccgggcttgtttgttagtgcctctcgctgattgctatatcccagctctagacttctgagaaattatcaaacagtgaaaactggtgctggcaccttggcgacccctgagcctcagttaccagggcagttgctggttttacccctggcctcaggaaagggttctcccccgacccctgcatagtgagctgtaagtgactgttaccatgtgtgcctgcctgtctccgtatcctaggagtttctcagcagagtgcaaaacacaggaataaactgagtgctgggtggtgggagctgctgaggcccccatgggccccgaatccagatgcttcagaacagcctcaacgtttataatgattatttactcaatacggagtcatgttttacagcgctaccttctaaaatacatttataactacctcaccagttacatattagggttccacattggattttgttggaaaaataaaaggtgaatgatcttgctgctggagcagtttgaaaaccactagggtggctcagttttgtcagtccacagatgggaaatcaagccacagacaggggagtcagtgagcctgcgcagagcccatggagtctggctccgggaaccagaacccaagtgtgcaggagagagctccatgggggtgagggtaggggtgggtgcaggtgctgggtggctggtgtttagggacagggtggcagagatagagtggaggacagcccagttctgggtcactcttcctcagcactttcttcctgcttcctggaagaagtggctgctctagcgccagggccttctgggagagccatgaattatgcacggaagccacaggcctgggcgggcccatcataaacgagccttaataattcatatggaaagaagccaggggaagggagggcctcctgggccagccctggggcagccaccatgctgccaacctctccgcaagctccccctgcccaccccacctgcctaccccatggccggccacacacaagctggacaggagggctgggacgtcagcaggactctggggaggtatattcactcagcaaatggcctgttcttccaggcgggagagcaggagcctcctggctcagggctcacagcccaaggcagaggctaacaagcaagagggaggatgtctgatggaatactagccaaaagaatcaccccaggaggggacgtggagatcagttgctgctggggggggtgcaatttcaaatggaggggcaaggaggtcttcacggagcaggtgacgtgtgtgtggagaccggagggaggtgggaggcccttggacttctgaggagagacagtttcaggcagagggaacagcatgtgccgaagcctgtgcagggactataggggcatgttcaggccacaccgaggggtgaggtcagggaagctactgggggtgcggccactgggtggacttgggttttctcttagtgcgacggagttgacagaggagggacatgacagcagggcactccagccgtgtgtagaggggaacagactgggaaggcaggtgccaggcagaaggtggaagccggtgagtgagctggcagctgcagaggtgcaggaaccctgatgggtgcccggccaaggaggcagtcggcagtgggtggattcaggcctattgcaaaggtggaacctgtagcacttgctgatagattggatgtgggtgtgagagaaagcgggttctaggtcacccagagtctttgacctgaactgagggagctgccatcagcagaggcagggagtggggagaagaggtggagacgatcccaagggaccgtcaggatctcggatctcgtttcggacactttcagtttgagaggccccttagccacacccgcagctgggcattgaagactgatgttctgagttgaggtatgtgcggcctgacgggtgtttgtgacctctgtgacctggagcacatctctcaattgctctgtgcctcggtttccctctgaggattgcggatagtgatctggctgctatgcagatgaattaaggcagtgcagtgagatccctggcctgtcaccactggctcaggcctcaggcagggagggcccccatcagaccccttgagatatggatccctaaatggtccatggaggcctcaggctaccactccttggttagagagggaaactgagacccgcagaggccaagaagcagagccgagtgggccacctgggtattgctgggtattgctgctacctggctccaggctgtgctgcttccctccactccccccaacccagcaggctgctatgagtaaatattgggctggacctggtgccctaattaatgccggatgatggctcactgttagtctgagggggaggcacagactgctgcctcccagcagagcaccaattagaaggaaaagctcttctcggcaaagaaagggaagggatagccccgtaattaataacctcatgaaggaccaggaagtatctgggcagggtcccaaggcacacatggtcgagagagatggctttggacccattcatgctttggcaacacctgcccctccccagctcctcagggtctccaaggtccctgtgctaactgggctgccttggttcctgtgtgcatgcaatgagtgggtgagatggggacggtgctcctggaggcatcatgctgctcattctagggtcccttcaactgaatcacaaatagattgaagatgggccagccccccttgagttctgtgccttggttgtgccagcttgtgaagtggtaggtggctagctggggagccttactctatcatgaatcagctgagcaagcatgcttccctctcactctgggctcagtgtcccctctgtggtctttgtagtgtgaggccagtgctgatttgccaccacatctgaaggcactgtaatcttgtggcccaggtggcctctggggagtgagtgatctcggctagactgttgccctctgccagccctatcatccttgggaggccctgccctgggctttgagcccccaaagctgctgaaacctgagagtcttctcttttgcatggacaagcaagaaggaaggtctggtcacaggaaaccctgcccttccccagggctccttggacaaggcaccccaccaggtctctgctgcattgggtctctgggggcagtgcagagaggggctgcagcccacctggaggccacagtctaaggaggaggcacaaccatcccatgtttagggagctgcaggcttgaggagggaggctggactgtggtgagagcagtcccaccttctggatggacctgtgtgccatgagtgtgtggggcagccgtcactgctagcatcccacatgtggggctgtggtttccacttagctcctctttgggtccttggaggtaaaaggaatggtgaactttatctccattttccaaatgtggaaatggaagcctaacaggaaaggtctagttcaaggtcttgcaaaagccagggctggatctaggcactcagtacactaggtactgtacactcagtacactcaggcactaggtatagagggacatccacccgagtggtcagagaggactccccagggaaggtggcccaggagatgccaccgtcctggagtgcacccttgaacttcctgctgtttgcagcagggcgagggcctaggggagggaccagccttgttccaagccctgcttcagctgctttctgagcttggagtgactgctgggggaagcacgccttctccaggctgggatgggggagtggcctgcttgcctctccaccctgtctttccccttcagaagactgcagaggtgctgaggtgggaggtaacaggccagtggaaataaccagaataattaagtagcactttatattttatagtttttatttttattttttgagacagtctcgctctgtcacccacgctggaatacagtggcatggccttggctcagtgcagccttgacctcccaggctcagcgatcctccaacctcagcctcccgggtagctgggactacaggtgtacgataccacacccagataatttttgtattttttgtagagacagggtttcaccgtgttgcccagcctggtctcaaatttctgggctcaagcaaactgcccgcctggggcttccaaagtgctggggttacaggggtgagccaccatgcccagcctgcactttattttaaattgttgccttccccagagctgggagaataattggccagcctatcatgagagaagcaagagacgtggggccccgccattgccaagtttgcttcaccgtgcacttggcagcagtggccttcactgtgcctgctccctcacactgctcacctgccccagcctcctgctgtcctgtcatccagccctcctgcttcccctgctgcccacccctagtatccacccctcactccctcacgaagcgcagcggctgaactgccaagctgaagggaaggccacagactgattataggtgcccagtggaacagggttgatccagacaggccatctgggagaggcagcagggctttgatgacaaaaaatgcctccgtgtgagtggtaagaaggcccacagaggcagagctcgggtgttccgagccccttgctccctaccaggccttgacccttccggggcctgcccctgtctgctcttgaacagagcccctcccccatcctttctcgcccctctgctgggtccagctgcccacacccacccgtgccctctgagggtgaacctgctgtgtcacctgtctctggttttttgatttgtttaattatagatgagttttctgcataatttattccaaaagcctggattatactgtacaattaaatcacattctgatcaacaactccacatataaaattaacaactggcaacagtttaatctatgctgctgcatctgcacacggactcttctcccttttccccatcccctcctcccccttcctcccccttcctcccccttcctcccctttcctcccccttcctcccctttcctcccgttcctccctgttcccgttcccgtacccattcctccccattccaacccccttcctctttaccctccccctcccctgagcatttgcagctgcccctaagctggaagcccccacctgaatgcgatgcagtttgacatgcagcctcccccagccttctagctggggtctcaatgatcctgtctgctaaaggggtgctcagctgcagcttctcaccccacgcacagatgatgtcactcccttgcctgttagtgatatcccctctccctccccaactcctcttggttctgaaccatgccctggaaaccaaggcctggcatcctgcaactcagggtgtcatcttcttacctgcagagctgcctcagcctgctaggcctcttctgcagtgccccctccccacaagcctccccaccccccacacaagctttcatagaagatgtcctgagccctcaataagtccttaggtcttaggggaggggctgtattgcatgagctgctagccctcaggggactgtccagtaaaagcctgtggatttgaccattaaaaactattcagccagtcattattacccctgtttaccgatggaaaagctgaggttctgagggacagaactctttgaggtcacacagcggcagaagtgcctttcccctgaggcttcccaaaggctacaatgtcctggaaagatgggatcatggaatagatggagtcaggacaagtctgtttctctttaagtatgtgaccctgtacccatccttaccaggggcttcaattttcttgtctgggaaatggagccacaatgtgttcacctccctagggctgggcacattggaggacgtgacttgatccctagtctcttgtgcccacaccagtcattaagccactgcagcccctagatgcctacatctcctcctggccactctcccctcactgccttgttagtttggcacttagaagcaattagggataagcagtgtcatctcaatgaaaagcatggaaaattacaaagatgtggggagccagcaggtccacctccgtgttgggtgtgtggcctgtgggcaacattgtctggtcagggaggcattggctgagccaggcacttgattccaagcagagggaagtctgggcaggatttgatcagcttatctttgacccagtgggggcagggacattcccatgcatccgttgtctttccaaggccccctcccttctgctggagtgagtacgattccctggccagggttggacctggcttggtgggtggcttctcgtccacaaggcaggaacagtgcaggtgcatagtcaactcctggccccctcagggcctctgtgtcaccccttggaggtggcactgggacactggcgaagtcctagaacccacaaagtcacatctctgtgacaatggaatgaattattttcttttaactctgagacacacatattgcctcctaattgagtttgatttaagtgaataatcaaagtaacttgttttccctggcactgtgctgatgggcaatgtgctagggcttggggtctgcccagcaggtccaggatgccaggcaaagggctggagccacctctagaccttgggaggacatgtgtgtggcctgctgtgtcatagcaggccagttcctgcagcccatagcagagtctagagctactcagcctcagggtgggagtaaggagactgtgcgtaagagagagagagacaaggagggagggagagtgagcgtgtatatcttggggaaggattggactttatcctaagacttggctcttctaaaaattattttagtgttgaaatagcctttttagatgaaatgatgatgattataataatgtgttgtctgagcaaaataaaacttggcatccatgtctcttctcccaattaattttcttttacttaactgtgaaatcctagaagcagggacctatagacatactagaagagtcaacagcctggggtggaatcagtaatgtgctgctgaatgtttacaatttgttctccagggggaaaaacatggtttctagcatttgccaattcctgtggtgtaaatattcccaccatgacctatttcaagctcctcaggtgatggtaccaaatgcagagttggaaagaggtgcacagaatcagcttttgtgagtcagcttttgtgactccagcacacttctagggcaagtcctgtgttcactacttcctggataggtgaccttgtacaggtcagttgaacccactatgcctcagtttccttatctgtaaggtgggatgataatgtttgcttctttgtaaggactgaagcgagaaagtaggtgacatgctggcactgcaccttgtacgtagtggatgccctcgcacataatgagtcccaggaaggattgattggcattttgttctctacaccagtgagtggctgaggtcagggtcagggccagggcagagctaatggttccctttggggatcagatcctcactctgcccatttgtctgccccctgcctggctgactgtgatagcccatcccaacattagcccccagggctccatcgcaggagcacaaaggagccatccgctatgttgtccacccacaaccaggccctggtggacaggggccaggggtcacgcaggctgtcaattttctgctgccctttgccctccccaggctggcagctgaggcctgcttgcccttcttagcccagcctgcagcctggcctccacccgcactcagggttagattttcccctgtggtggggagcggaggagggaatccggctgtggctcagccagcaacaagccgaagctaatacctctttcttttgatgttgattttttttttttccatcatggtcctgacattcagcttggcaaattgcaattagtgatctgcctgcctcctgctccgagttcccatgccaaccgacccaggcacatacagttgcatgggcccagccccttagtcacaggcctgagtggaggaggcagggcaggaggccaggtagaggcttgggctcttctgatccatggagccagaacagtcctggcccaagtggcactggaggaggcagcaggcccagggagttgggaccagatgcaatctcctgtaccccatggctcccggggtacctccagaggctggggggctggcatcaccctgcccctactgtaccctgtgggctgtgtttgacccatggcttatttaaatcttcatggtaacttttttgtgcgcccttcctggaaaggtcttggtctgtaaaatgggagtgtgtcaagtgggatggagaagttgagataccttttcaaatgcatgagggcaaagagcacctttgtggttctgtgtggttctctctggctggcctctggcaaggtctagtgtggttttgctcgcctgatctggctctgcttaagggagtgggtcatgtatctgaacccaggcaaggccttgccccagactccttccctcttccaggttgtgggtctgagaatagagggccacgtgaccaactgtccatcctgtccactcacaaagatccccatgcagcgaacacgcttgacttacctattctcatgtgttcttataacaccctgaaaggtggccccaaattatccccgtattccagagaaggaagctgagatggaaatgggttaaaacaatcccagggtgggccgggcacggtggctcatgcctataatcccagcactttgggaggctgagacaggcggatcacaaggtcaggagatcgagaccatcctggctaacacagtgaaaccccatctctattaaaaatagaaaaaaatagccaggcgtggtggcgggcacctgtagtcccagctactctggaggctgaggcgggagaatggcatgaaccctggaggcggagcttgcagtgagcagagatcgcaccactgcactccagcctgggcgacagatcgagactctgtctcaaaaaaaaaaaaaaaaaagaaaaagaaacaaagagcaatcccagggtggtaccagtgtgagggagacctgctcaggatgtggctcaggtggattgtgaggcaggatggtctgcagtggactcctgagtgggtgattcctgctggacatccagcaatgagcctcgggtaagcgtctgtctaccagggtgttggataggcaagggctgcctaatctggaactctccacgtccactgctcaggtgagacctagaggggcagggacctgcccagttacacaatgacttggtgacagcagtgttccgtccccttctctaggccccacctggccttgggaacaggaggctccaagatccagcagacctcactccctgaggctccctcatgtctccctcctccctggtgtccagaagtccccaagttcagagcagctacatcaagggctggctcttcacaatgaaaagtagcctcactgcaggcttctctgagctgctgagctccctcagcacatccacaatgcaatcctctctcctcctcgccaccccacagtgcatgaggagcacctgggccactgggtctggacttcaaaggggaatcgcaggtgcttgctggttccttgctgtgggtcctcctctagtgaaaattggggtgtgagtggatagttgcccccagtgcccccgggttggctggggtggggctgtgcagctctgggcaggccctcctgacacctctctcctctctctgcatacaggatgcagcactgggcccggcgtctggagcaggaggtcgacggcgtgatgcggatttttggaggcgtccagcagctccgtgaggtgagcccggtgccacttgctgtctcttcagggaccctcttccaagggaaggggaaaagcttcagaaataaggagtgaggaagatttggtttaatggaggtcctggtgtggtgggacctgatgggcccgtgggggcaggtgggacatgactggatgggcagcactcctctggggcctggcctgctcttcctgaggcaacgatcggagccaccacccggcttggacgatgaccctgttgctgaaagggatttggagctttttgggctttcaggagggagaggtctgtgtctgagggacacctggggtgggagcccaggcccaggaggggtcagtggacgcaggggtgcacaggagctgaagggatccaggaaacaacgggatggccggtccacaccagcccgaaagcggtgcttgaggtgctgtagcaggagacagtggaaatcccatgcctggtgggatgagggatcaaggtgtgggaggggtgattgattaggcaccagccaccacatccatcctgggagattatgttaatgtttgaaatagtgatgtgaagagcaggccatccatcacccccggaagctgcaaaatgtgctgctgtcaggccccgggctcctgagccattgctctctacgtggagatgcagaggctgggagggccgagctcttggagtgatggagctacgactctcggggtacgtgcagtctttgaggatcttgttgccgggggcttgggccaggaggtactgaccagaactgagcaggggattaaatgggggtctcccactgagagttggctcgggaacagcagagtaagccaacctactgttgctggttcagtcaggagtccaggtccagggtttggagattatatacccactgtgttcctgttgtccctgttggtcagggccagggtcagcagatgtaacctcggtggggcagggaccgtaggggttgtcctcaatcccttcctcatgcttagcttatagctggtgcccaggaagtgggggtggcagccagtgtgttgacattgggtgtgaatgtaggacctctggcacaggctggggctggtcatgggtggctaagtacgtggcaacgccgtgggaagggagagtccaggtctggaggtctgtgtcctccctgccagtggcccagcgacactaaacacccctttcctggttgctgggcttggatgtcagcagcctccatcacactgtcttcctgtgaactctgaatgactcagccgcacttggaggccagcagagctttccagagaaagtgctgtagaaaaagctgttccggaacaggagtcaatttaggctcaggaatagcacccagcactaaccaggctccaagtagccactgccaaggatagctgtgtgggctaatgaaggaatgatagctccctgatgtgtgcagccagcacctttccaagtttcatatcgggacataagctataccacatatcaggagttaacggtactcctccagtcaataatccttcatgcctcaaacctttagcttgaagatgttgtttattttatattcacgggcaactcaggctctgaatgtctggcaatgagaaaatagtgttcatacgtcatggccgaggtctgtctggaccagtgagcttgctagattctgagaaccagagatggaatcccagctcagcgtaccatcatgtgcccctgggtgagcctggatcctctctgatcctcattcttgacccatacacagctgggaagtctgaccggaggatgaagtggtgaaaacagcaatggacaggctgatacagatacgccccttttttggaaatcaaatttgaatttccctcattgatcattttcactcccagggataatttcccttcctttctcatgggacttgagagattctagacactttcatcagtgagcctgtctcccccaccctctccctcccagcagtcaccaaggtggtcatgctgctggcttgtagcagagctggggcatggacccagggctcctgactcctgttccaacgtgcagctccggctgtggctccacttcccctcttggtagggtggacaagatgagcctggggcagtagggagctgggccagagcagggccgtgctcagcgtggcaggcaggcaggcagagaagtgctgacctggcatccccggcttctcctggcactctggtggagtgtctctgcctgccgatggctgccagcgctccagcggctctctgtcctgctctagttttcctcctctgcttcttcagcctcttacttcctgccaacagctctggggctgtttcttggcacggggcactctggtgaggtgggcgtgggggttgggggttgaggtgtagagttctagaggaagagggcaaccctgtgggagcaggaggagccaaccagtttgctccctagccctccacaactcacccctgaccccgactgagccaccattgctctccaaatgcacacgaagacggtccatgtacccagcccatacctggctctgataggtcaggaggatgcttggagaaaagccctggcccagctgtgatactgctgcagaccctggcaccagctctgccaagctgacagccttggcccccagtggggctgcccctcctcagccctccttgagctgattctgaattgcccccaaacagctggggtgatctggcatccaggccccttggccttcttcccctcaaaggctgcccagcctgcgtgcctccatcctagaggctgccccactcccagtagcttggagccatgagggctggcagctgccagagtgcagaaactgcagacagtagcgtttggggatgttttccttgccttggcactttcctcctcctgacctcaccataacccccatgagggcatggctgggtgcaggctggcccatttgcaggttgaaactgtggcatacttctgtggcatgtgggcactccctgtgaagacctcatctcatttcctcatctaacatcgcagctagtgcatagctggagctctccttgtggcctggtgcttacgtattgtccccacccccacgcttgtccagacaccctgagtcgcatcctcctgggttccccagcccaactcccccaacccgtggcccactcttgccctcaataggccacaaaagtatagaccctactgtgatgtccccctgcagagcccctagggcctgagcaaggtgtctggagcctcttttctaccctcccacttcagcaccatattgtcccatcctgggggagaatagagtgcatatgcttgggctctgagctcatttacataatgaggttgatcaggatgaataattcatcaggtgcctgggggtgcatggggaatgggggtggggaggatgtggagctgggacaggtctcccctctctgaagcccaggtcactctgatgggtacagccaggaacctgccctcttctggctaggtgtctagggtccagggggagcaatgctgggaacctggtgggaaggcaaagcaggagagattatagtcagacatgatgaagaatcagttggctcctgaggcatgccagccccgggatgcattcctgacctcggagagacaccttccttggaggatctctatagaaggagggaagctcctctgcctggggtcggggctgaggctagagctgcctggccagagctgggctagaagcaggaacccgagacagccatgtttggaggccacaggctaccctctgggaaggctcaagccaattctggacccatggaagcctttcccagtcctcatcaaccactcatagcttgcgcgctggtcagggcagaaatggcatacggcgtgacccatgtcctgcctgccttaaccccatgatggccttagcccagctacatgctgctagttattcctgtgatcctgtcatacaaatggggaaaccgaggccctggctgctgtctccaccagccagtctcataatggatccctggcaggtcagccctgagtggtggttggggagctgtctagcagaggagctacccggggccgcccctccccaagactgctgagcctgcattcacagagaatgggaccccaggacttggaaatccccaacctgagtcttttgttcccctcccacttctgtgcttctctggacagtcatggtgattcagatcaacggtgtctgtgtgtctccatttcttatgggtagccaggaatggcattttccaaccagtgacagcggcacagtcctactccatctactccatcttctctgcccccagccatctctgtgccctgtctgctcagcactcctcaggaatgtgtaattaatatttgtggagtactacatctggagctggctcccggcactgaccaaagtctggccatgtccagggccactttctcgaggggctcaggtaggtgggacagggccactctgcaggtgcctttgagacaggcctccccctgtccccttccaccctccacctcagccggcaccaccaacatctgaaacacatgcacactcacacactgactctgggggtgctggctgaggctgagctctgttaccatctagggagggtacactctgggcgggtgccctctgggcatccagagtgggattagcagtgcccacaagtgccagggaacctcagaacctaagaggggctggagcagaagaggaagaaggaagctggtggggaggggcgcccagagggccaggcaagaggagcacaagaagctgtcccccctagaccccacagaaggtcccctcaccagagcactgtggttaacatgtgcccacaggagacaggcatgcagctccttggccaggtcccccactggtacaggctgtcgcactgacgcaccgagagtcaggtgaggggtggcaagcatggcacagcccctctgcagggctcccgcagccttgaagccagcatctccaggctctgcacttgctcatcacgcagcctccacccctctacccagccacctcctgttgaggcccagcggtgccctcgtctcctggtgtagatgatggggatgtggggcgcatcagggtggggggcagtggggaagcgcgggtgtgaaatatgccgctggatagggattgctgtcgcttgcctccctaaaaacccacatatattattctttaatggaaagttaattgtcttattattccgtccatatggtcctcttgcttggcacccagcagggatgcgtggggctaaagggggggctcccgggagggcgtctgagacgtggtgaggccgctgctcgagcataattgggtagagagaggcagatgcataggagcctgaccaaagccctgcctagaccccctctgtgtcccccccaacccggcctgctctctgcctctttccttcccaggcccagacctgggggcagcctcttctggtacccttctcccccgcccactgtaaagtctgggaatgttctctcttgagcactgtgtggggagacacaggattggatggggagtggctgttgccatcttgaccaccacccccccccgccccctccccccatatacacacacactctgttgctggcaggagaaaattccatttttgagaagcttttctaaagctatttcatccatggcaggcatctggcctgggccagctgactggcttaggtcgcccatatccttccacacgccctcatcagagaggggctgtgtgggcagggggactgtcctgggatgcctgtcccagggaccctggctcatgttggccaccccttctgtggcaccagccacctggagcctcccccaccccagtggctcctccaggctgctgaggctgggccaggtatgggtccccttctcagtcccttgttccctgtcaggcctcctctcttcctgccccctggaatgagggtattgtatcagaacagcctagacaaggtagagatgcagtggcaggaaggccccagagaggcctggctgcacatgggcccctggctcctagagtcctggcagggcagcgctggggcagggaaccctgctccaaggcttctgggattctgagtagcctcagcacggagttgccccccaggtttctgtggaggccatgggcacagaggggcaggtctgtgggagcagcatctctgggtgggaccagctggtggtgcagtcatggagaggggccttcagcttccagcttgtgccaacaggtcactagagggcacttccaagatcagttcccaggggatggggaacagcttggagtgggagagaagcggtaggaaaagctgtgccttctgaaggtaggacctgcctgtggtcccacagctaaggccaagctggatttgggtttgaacctagggcctgtgccaggggcaatagctggatggtgggaagtggtgaaaggatgaagcagacaggaagggcaggcactgtgggacccgggacatgttgtcctgcctctctgagccttgattccctcacctgggaaatggggatccaagcagtactgtctcacagggtatgtgaagatctcaggggagcaggagcaaggaacggctgcagacctagccctgcgtaagtgtggggtgtctttgtcccatctccacccccacaaccactgtcaattgcctgcccttccagaggttgatcacagtttagaaaagttcacatgcccaaggtgtcctttctgcttgattcagtccaggggtttagaaactggtcccttcatctctgttgatcatgacaccttttagggacatctccctaagatggcacaaaggccaccaagctggggcagagcttgaaaaaatagggcctgtggaccagcgaagggtacgtgatttctttggccggaaatccagggagctagctgcagagatgctgttggggaggagatgggcagagacaaaaggaagggcccctataccccggaagactgtgagtcagtttctccaatcagtcaacaagttgacaccttgtctttcaggcctcatgggcttaaagaaggggatggacagctgggcgtggtggctcatgcctgtaatcccagcactttgggagcctgaggcgggcagatcatttgaggccaggagttccagaccagcctggccaacatagcaaaaccctgtctatactaaaaatagaaaaactagctaggcatggtggtgcatgcctgtaatcccagctacttgggatgctgaggcaggaaaattgcttgaacctgggaggtggaggttgcagtgagccgagatcgctccactgcactccaccctgggcaacagagtaagattctatctcaaaaaaaaaaaaaaaaaagagagagaaggggatggaatggagtagggagtcatacaaagccacccaactctgacctgtgcctagatgttggcgttgggaatggggaagttagtgcataagaaaatagagtggctgaggccagagctgaggatcgggggttcttgagggtggaatctctcaggatctctggaaggttctctgcctgggttctctgtccctcagtttaaggaagagacaatctcagtggccatgaacagaacctccctaggcagacagcactgctctgcctggaagattttagtcgctaacccttggctttgctgcagggcccttccctgaagtgagggccgctcaatccttccatcttggggatcagcaaggtttgtctgtgaaagtttcctaaagccacacacacacacacacacacacacacacacacacacacacacacacacacacacacacacacactattctgatgaacttgctggttctcttcagaggtccctagggaggctggccttacagcaggacagcgggagatcagttcaaactcagcccttgcatcttgttgaagagtagccagggtctgctgtcaccccagccggcctatgcatccatctctgaaaagggacagagctgccatgtccagagccggaggctggtctgaatgttcgagggtgggagatggggcttggggacagagggctgaatgggtttatgctcggccccctggggacagttgacccaatctgcattcctcccccatccttcactccctttcattgctggatcagtggcagccacggagacacttgcctcggattcatggagccccaagcacttggcggaggcagagaagtaattggttctgacaaaccacagccggccccaggggcggcaggagcagcattccccacaaccagacaggagatggaggctcagcatggcctctctccaccttctctgagtgtggctgccctcaccttgtaagcggagattttatgtttggagaaagttacggagccataaaccttttcttatatctgtctcccagccttgggacctgacagttctgaacagaggctggcctgctccatggagagggggagagactgaggcaagggttggctcctaggcacaccccctccttgtctatctttgggttctcctaaagcagggaaccaagtgaccgacccttggagcttgagggcctgacctcagtatgcaagggtgtgcagtctggatggagaggcaggctatgcacacacgcaggcgggcaggtgtgtacgtatgcctgtggggtacacatgtccataggtgcccacaaggctgacatggaggaggtgcccagctagtaactattcagtagatggagaagcaaagcggcagtgctctgaggactgaaaagggacagatcccggctctgactctgtcccattcgaccttgggaaccatctgcccccatggagaaactgagactagtgcatcagggttgactgagccttgatgccagatgccctaggagatgtagcaggcatggggcatctgccaggactcaaccccacatagatgatccctggattgctctttgtgagggtatggagggcccagcagcagtggagaggagctggatgtgagagtgtgctggctacccagatactggtctggggccagggaggctggccattcctagagtgacttgaaggcttggcccaggtgtgtggcaccaggctagggtagcaaggagcctttctcaggcctttgggtgtcctccccttcactctcactagaccactcagcttcttcaagtccacttgccacactcctcactccccccacccccttacaggcctcttcccagctttttaaacccagcccacagctcccctcctccaggaatccctccagatcaatgctgaggccagtggtgtctgatacttgctgctgccttcagcttttgcatctttcgggtacagacagaagatgggggttgtcaggaatctctggcaggcccaatccagtgttcccatcaaatggggtatggagaccatggccggaaggcagggtcatgcccaggctttccaggagtccacctgagtgcaggcggtcagactgggaaggcagctagccctggtgattcttggtcccgtgatccactgtagacacagttcctgacctgctgaggctcatgtgaggtggaacatgggctgatcatggttcatgagagatgcgtggtgctgcatggggaatgtgagcacacatgcctgcacacggagaagagaataagtgaacccctgtgcgtcagtgctgtaagtaacatgtgagcgtttgtgtgtccatagatgggagtggtcatagaaggtgagcatgtgcatgtgtgtgtgcacaaatgtgcagttctgagtgctgcctgtggaggtgtgagcgggcacacattagggtagggtgggactgtgaggaggcaggtgtggagagctctgtcacccgagcaggcgagaactacttagctgattaattagcaaagctgagaaatctcaattgtgggtgaggagcacacacacacacacacacacacatgcgcacacacacacttcccccatgcatggtgagcatccccccagtcactctgtctgacactgctcagcagccctgcatgggggcaggctgccaggtggttgggggtgcatcctggggtggggctggaccaaagatccctactgtggagatcataggccttgtgcaaggcagttctcatccctaatccagtgctcacagaggctggtggtgaggccacctaggaccttgtccccatttcacagatgagagagctgtggctggtaaggagcaaggagccagagcctcatttccaggtcccgggcctcctggggagtgggggcatcctccagagtttgcaggcatggtcaggtgattctccagtgcacttggatccactgaagagttaccttccaaaggcagggggacctgtcttggttcctttgggcttagagaagagctagtgtccaccagggagctttctacagtacaagacaaaccactcccacttacaacccctagatgcttgtcacaatccagtttcctctgcatgccttgcaggcaggccagggagacctcatcccctagaagccttcttaacacctcccttcacccgatcctagaaagtgagggtcccccatgctccccagctcccatagccctgtgcgcctccccatcagcatgaatcactgtgattgcagctgcccgtgtttcatgttcgtcatttgggcacagctcctgggacactgatgggatctgttgaacttgtacctgagtcttagagtctgggtttgatgctgactcctggcaggcagacctgctgcccctcaaagacccctggccctgccactgcactgcatcatcgtgcagggagacccggaagctgggtcaagtggcagccacttgcctcttgatcaggtgctgacggaggagccttcattatgctccatctaccagtgtggaataaattggtgtgcagtgaatttattccttctaaagacggactttcacaccagggaaaacttttaaaaagaacatttatataaaaagcaattactatgccagtaatttgtacgtattctatctaccccttccatcgctgcctttgtgttcaaatgtggccacctcccgggcagctgcagcctggcacccagcctcccgactacagcatgccgcctgctggagtggcctcctcctccgggaaggatcaggatggagggcctaggcccagcaggagtatggactccaggagtacagctgggtagatttatgttcagaacaggtgctttggaaatttcctcccatgtgcatctctgtcctgaggttgctccagccccagtcccagggctggcacatcctttctgggcccttcttggcagcagccaagcacttaaaggcacctgctttccagcagccttgcagcccagttcgctagaggaggaggcagtggtgtgggagcaggtattttcccttcgaggagccactaacgggcaccctgcttccccagccattattgctctcacactggatgcattatgtaaattgtctccgttgctaagtggtagaggagccactcaggggaaacgaaggagcaggtctggagccttctaggggcaaagcagactaggccctgaaaactcatcctctgcatcaagaagggtctggccgcttctcctcttagactaggacccctgaggctggcatactgtgtctccccctcagaccacagcttttatgtgggctgtggcttcacccccacagcagacagggtttcccaggaggctggataggttccctcattgaacagggccaccagattgaggctttgctacccactcagaccagctcctggggtaggacacatgcccctctgttgcccaggaaggtctgattctcccacctgcatgattttcagcagcagctgggcactggagccctccaggaatgtgcacactcaactcacagccttagatgccctaggcaaactagagaaggtcatgtctagtcccaagctagttgacctgcctcctccacagatcctggagtgcccaaataatcttgggccacttctgaagtgagtacccagtaaacgtgggatgtagaaaggtgaatatttggggtgatcccacatcctggggtgccagcaggttcttgggtcgctgggggggcttcagtctcaatgagccatggcctgggcctggtcaaggcctgggtgatggagggagttctcccagggtactcacctggcctgctgtcctgccttttgaggagctcccatgctccctctgcatgatctgcagaggcaaccgagcccacccagggcgtctggattcagcatctccccttctgaggagccaggtgcgctgggcttcatccaaactgtgttggactcctctcagctgagcttgcccttggcatgaggtctgcagtgcaggctcacatgagggtcctccctccctgggactcaggggctctctcacgcccagccttcgttctccccctgggacaggatgtctgtcccatacaaggaggccactgggttgagggcttgctggtttgtgcatttcctgaaagttacacaaagagttggggattccagggagggtgtgagaggtggcaaagacatttgcagcccactcagccccatttctcagacagccctcctctaactcctgtcccttcccaggcagggctgtctgttggtcagggtgaaatggcacagctttaaacagaggtgtgtacaaagacagtgcttccttggctgcatagactctgggggagaccagcctgaacaacatggcaaaacctgtctctacaaaacatacaaaaatcagctgggcgtggtggcgtgcacctgtggtcccagccactggggaggctgaggtggaaggattgcgtgagctgaggtcgagattgcaatgacctgtgattgtgcctctgcacgccagtctgagtgacagaatgagaccttgtttcaaaaaaaaaaaaaagagaaatttggagcttcttccttaccacctggcactgtcctctaggatggatggcattatctctcagatgcctgtggctgctgtccctcaacttgctttgtgattattgccaacttttgggagtgttggggtgggacccctgaccagggatcaccaataccaattcagtgtttcagtctaaggagcctggtctgtgtacccagttgatcagggaattgaaatctcaaactgtcttcattgcaataagagtaaacagaagtagtgatgtcgcctgctgccctttgacggccactgtcctgaggccagaggctggagtcaaagcagtcagtcccctgtccctgactcctctgcctacattcttctctctctatccttctatccttcccctcccagcctccctctctcttttttttttctttttcttatatttctagatggatttttaaatttagggttttcaaatcagtgttacacaggcgcctggtgtaaagtcatggttttatcaggcgagttgtgttaggagcacagcagccccctcctctccatttccagctccccagaggctgtcactttctaatctctgagctccatatctctaaatgacatacttatgtcgctacttcttgattgttcagttttaggcattatccgtgggcatcctgctgcgggagaggagggctttgcacccctcccccagcccatccctcgcccttttgtgcataacatgatatggtgaggctcactgttgacattgccctgacccagcaaatgcaattcagaactgcgccttgcggaagacttttggatacaattttttagttgtttcctaccagtaaaaactgtctcagttttgttagttttattattattatcattattattattattattattattattattattattattattattttgagacagtcttgctctgccacccaggctggagtgcagtggcaccatctcagctcactgcaacctccacctccctggttcaagcaattctcctgcctgagccccccagtagctgggaattcaggcacgcaccaccacacctgcctcgtttttgtatttgtagtagagatgagattttgccatgttggccaggctggtctcaaactcctgacttcaagtgatccacttcccctgcctcggcctcccaaagtgctggaattacagatgtgagccactgtgcccagctgttgttagtttatttgtttagtcttctgtgaacctttactcactctgcccccaactccccgccactttatctgacctggctctcatacacctgggcttctgttaaattaaatttaccttccaagaaagtcctgcccagagccttccaccttgctccagggaagactggctgctctcccagcctgcggcaccaatgtgtccctgggatttcctttccccctcttggggttggagtcccctctttcatggatcccatggcctcttccttagacttctccctcattttggtgtagagaacattttttctttccttccttccttcctttctttctttttttcttttttttttttttttttgagactccccaggctggagtgcagtggcatgatctcggctcaccgcaacctctgcctcccagattcaagcgattctcctgcctcagcctcctgagtagctggaattacagatctgcgccgccacgcccagctcatttttgtatttttagtagagatgaggtttcgctatgttggccaggctagtcttaaggcttaaggctagtcttaaactcatgacctcaagtgatccacctgcctgccttggcctcccaaagtgctgggattacaggcatgagccaccacgcccagctgagaacattttcagttggcttcctgaggacaggtacaggggagccagactttggagactgtcatgtctcagaaagccttccttctccccaacgctcaacagagatttcaggtgggttggaagtccagggtggaaaccatttgccttagattttctaaggcagcactccattccttccagcttcttgagttgctatggagaggtccccagtcattcagattcccgatccattgtacatgacctggtttttatcagaaacttgtaaattttctccctttgcccagtgttcagaaattccacactgacctatctttgtgcggcttttcatttcttaccactcagtgcacactttcaaactacttgtgtccctcagttgtgggatgttttcttgaatggtttctttgactgtttcctcccttctcatttctctgttctttctagaaaccttaactcaggccctgttcttttttatttttcttttgtctccaatattccatttctgtgtctttctgtgagaaaatcttctcatcaaattttacatttaaccattgcattttaaatttccaggatgtcttttggaactttttttttttctttttttttgagacggagtcttgctctgtcacccaggctggagtgcagtggcgtgatctcggctcactgcaagctccgccttccgggttcacaccattctcctgcctcagccccccgagtagctgggactacaggtgcccgccaccacgcctggctaattttttatatttttagtagagacggggtttcaccatgttagccaggatggtctcgatctcctgaccttgtgatcctcctgtctcggcctcccaaagtgctgggattagaggcgtgagccaccacgcccagccggacctttttaagaataatatcttgttcttgtttcattcttgccacaatgtctgttagttgtctgaggacagtatagctttatagattaaaaaaaaaactttttattttgaaataattttggatttacaggtaaaacaaaaaaacaaaaaaagaataattttagatttacagagaagatgcaaaaatagtacataaattccctaaccctttgtccagtttcctttaagttatcgtcttgcataaccgtggtataaatatcaaaactaagacatcaacattggcacagtattgtaaaccaaagtgaagaccttatttggattttaccagtttttgcactaatgtccttttttggttccaggatcaaatccaaggaaccactttgcatttagttgtcatgtctccctagtctcctttttttctttaattttaaaaaacaggcttaattcacatttcatgtatttatgtatttatttatttatttagtatttaaaaactccatgttgtagccacagttggaacctgcaggggtgtcgggggttgactccggatcaggcgaggcagacaggatgggatagtctgggacagttcctggtgctgaagaggatggagggtggaagcagtgcctgtgggccaggggatctctggtgggagcaggctgcagggtgagaaggcagaacccccaggaatcaatgggatggttgggaagcactgcctgcctctcatattccttcctcagatgtctgctgacccctccccaggaggcagccagtgagctggtggggtgcagcagtgagcagttcccagtcacctggggtcagagggcatgggcttctcccctggactcactcacatcccggggtcctggtacaagtgtaccatcaggttcacattcctggctggagttctgaggggctcgaagcttttctgagttcgcacctaggtcccttggctccaggtgctggaggccccagggccctgctgggggacagtttttagactgatgggcttcggagtcccagatcatcttcctgtgtgacaccctgtagtgccaagggctgaagagttggggagcagggcaccatggggtgggaggagtgccctgggctgatgcatccccaccacgagtcaggtgagagagttgggaagaccctgtccccaggcccagcagattagtagtgagcatttaaagagagaaaatggacccatctgtgcttcatctatggacagcagtgacaccccagccttgtgactgagtgaggggggcaactgcctccactccccgtggcccaggcagaagcactaggccccacaatctcctcagggtgaccctgacctttccctgccacccatgtgtatacctgggttcccttttatcaaatattcttctgctaatctcatctccctgtgtgactgccctgtaattagctcactttgcaaaatatgatgtctgtcatagttccccctccatgtttttcttttcccaggaaagggtaaagagggaatgggatgaagaaagatttctggatgtggggccacctcacaggtgagctctggccctgtcccctgcacacagagccccacatacactaacacatgccccagctcagctccagagcctagagagttgatggaggtcggtgggctgggccagaaacccggggaagggatggcacaggcctgactgagcaggttccccagagaaggttctcccggtcttctagctggggtttcaggacctagcctttggggttccccagcattaacccattgctgctagcagtgggcctgccagggcctggtaagtcaatcaccatagtctgtctgctccagcttccaaaatgttgttcctagtgcctcctgcacatttcctttgttcctgtgggttttgccattttgaatagtccttaactgtcgtgccagggagtttggggaaagaaagttcgccaggcaccattgctttcacttctcttgtagcagctgagtccttactgtttggttaagtgaaatctacgctgggccctggacagtgaattgatgaacagggggttctttggctaagtgggtaggcaagcccgggctggtctcttaccaccctctcactacacctgaccctccacatgagcccagagactccctgtctactgcctaggactccagggaacacagtttgagaactgctgccctgtacatgggggtgtgttgggcacagggcttggcttggagttagcagcagggagtctctgggactcggggaaggtgcagagaggcagctcagctagcctcacagggacacttgagcagcctggttctctccccgtggccaggtgcccctcgtcccaagtctcagttccccatctgcgcagtgggaagccctggcaggcctggcttacgcagccagcagcggggaagggctttgctgataaagcaagttctgccttggctgacagcgggccagctattccctggatggctccctgacccagcaccttccctgtgctcataatctagcaggtagtgttacctggggcacccatggctgggggagggcattaccctgaacctggcaggtggctgaggctcatccctttggggcagctcccaaagacttagctggttctgagtgagtcagggcaggtctctgagcctccccaaggccatacccttaccctcattagtctgtccacttgggctgccctcctcagtccccatcatcacctattgagattgagcttcttctgaagctgagggagtaggagggtggactgtgagaagaatcaaacaaaaagaagagcctcagaaatcaggtgacctgggtcttgtttcttcatatataaaaggtggagggaagtctctgcgctcagcatcattgctgcaagtgatgaaaccaagcctcaggtgtgttgaggcagtggcagaggtacgtggggttgttggggcaagagctggacctggggctaaaggctggagcaagaggcaaggactggacctggagacacagctggaccagagcacctggggccagggatggactgcggagccaaggcagaggtttccaggagctgcggggagacattggcccctgagagagggtgagcagggtgtagcaccttctagacagtttttgaaaaactcagagcccagattatggagtgatattttgcaggtagctgctggttacaaggaacgatatttagcaggaaaggaagcctcagttccaacttccctgatggcatttcgagagactgtgtgagctggactacctgccagagcctagtctgtcgtttttgtttgtttgtttctgtttgtttgtttgtttgtttttgagacagagtcttactctgtcacccaggctggagtgcagtggtgcaatttcggctcactgcaacctccgcctcccgagttcaagcaattttcatgcctctgcctcctgagtagctgggattacaggcgcgtgccaccatgcccagctagtttttgtatttttagtagagacagggtttcaccatgttagccaagctaatctcaaactcctggcctcaagtgatctgcctgcctcagcctcccaaagtgctgggattataggcatgagcctccacacctggctccagtttatcattttatttgggggcttcattccactagtgaactctgaacagacagtactgtccttgggggagccacaaggagtgttatgaagggtgtgaaactgggatcagaatctgggtcctgatctgctctgcctcctctgacctttccaggggtagcctcatatgcatgaccttcccctccctgtctgaattttctcttgtaaaaccaggcggtggaacaggacactatccgtgttcctagttcaggcagttaggcactaaaggagggcaggtagacagatgctgagaagtaggactgagtgagaaagggcagagtgtgtgaggggcaggcctgggagggcagcagggttcctggtgggtcctaagcagggatccctggagacaacggtcgttctgactgcctcggccaatctctcggaaaattgaggcccagagaaggttgggacagactctcagccacctagcaagcttgagccagaacacaggatccagaccctatcccaggccagtgagtgaaaattgtgaagtcacaatgttggtctggctgcggtgggcaagacacatctgtgtgatagacccactcagctgtgaatggagctgactccatccttgaaatgtgtgagcctctcccctcccccactctaccagcccttgcctcttcttgccctgggcagcttttgtgtcttgggagccaaccagaactcaggctaggtgctaattaaaagctacctacctcctttctgcagaggctgagcccctccatttgcacacagcccttgtctaccattgctagcctcaggcaaatgactccacttctctatgcctcagtttcttcatctgtaaaacagggctaacatttcctgtcttgcctcccttctggggtgtcacaaggtttaaaggacacatgctgtgtatatgtagggctgcagacatgaggagtcctggacgatgggcaatagctgccctcctcagaggctgtggggcactatcctgggatgggtagaagttgacaatgcatagctggggacagcttggatggatgggggcagaacgaggagaggaatggggggagcatgtgggcccaagtgtctgttttgctgattgctccttttgctttcaaggagattaaactatttttagtctgcgctactgctggtgagacgccggaggaagcctttccatcgctgagatcttctggaagctgccaagtgtggtcttcagctcgattctgggagcctcccagagcaggcgggaggggtgtcaccatctgggggctgtggggacaggctggtgtgtgcttgctccctgaggtccttgttgcgctggcctccctgagccgtgtggccctggcctgcagagaacagtaatctgatgcacccgatgtttgtaacgctgtgtttaaaaaaagtaatttattttctaattattccttgtcttgcataaccgtgcatcgccaaagtgtcgctatttaaaatatttatctctccacgccgcaggagcagctctggagcgtggagggagaagaaataaaagtccatgtgccggtcgcaggcatattactttgactggtcctggcggctttgacgtctccctgtaaatacatttatttttcattaggatgtttctgagctcgtggcccccagagagcggagtgattatgccgctcatctgtgagagctgcaatagagaggtgctcaatgagtgagcgccaccaaatgcctccggtgcttgtccgcatgggcgagggtccgagtatgtgtggcttggggtgtgtgtgtgcagggggcgtacagtgctcagctgcatgtataccaggagggcatgtggccagggactttggacctttggtgtgatggggaaaccaaggcccagagagggcctgttttggagtggaatcagcctcactggcagtggcggtgagcagcaggcttgtgacctgttctatccctagggccgaagcctttcttttcagctgggaagacttttgggattggacgcctggaaatgctgggtggcttcaaggggggcgccatccagatcctgaagcagagggcctaccagtgcagcaggcagtgttcccagcacgcagggcaggatgagagctgacccttccccttctctgcctctccataggctgtgggtttgagccatgctgcagaggctggcccaggcagtgcccctcctccagccaccctgtggagcagggactggacttggctcctccttcactaacaggctcttttccaatcaaaaaaaaaatttttttttagctcaccgagtataagagagagttttatgctgaattttaaaataccttattttttccagtctctaaactgctaatctcccgggctgagggattctgggacaaaggcaaggcctcgaagtggaaatctgtaaaattagcttcagcggtattagtgtttgcagttggagattgaaaaattgctttcccaggccctgattggaggctccgctctcctcgggggagaggcaaggactcggcagagagagatgctggaggccaggttgggggtggctggggggctgttgtgggggcccctccaggggcctgtgagtgggccagggagggtgcgcgtcctctgcccgagtctcccccatcaacgcccaacttctccggcactctgcgtacacagcgggtgccaagcaaatgctgtggagtccggctcggtcccttccccttcttttcctgaggcctcctggactcggttcctagccccctccccagtgctcagacacaagagggaggaggaggcttccggagcctggctgaggggcagctctggtgcctgtgggtgcgcctgtgtggcccatcaggcctcttgtgtgcttgattgcctctgattggctgcagctgaattcagcaaaagctattatttgcccttgatgagccaatcagatggcctcattggccattcagagcaggcaccggaacccgggtgtggagggggagatggggctccgtgaggcgggggcagggcagaacagatgcaggacccgggcctggtcgtgtccaccgtgaccttcacacagatcacacctcccttccctgacctaccactccaaaccggggctcccctccacattagcctacctcccagccgtggccctcaccattccctcttcctgcagtgctttgccttgcacatctacctgtctgaagccctcaagacatcctccatggagtccattcccgtctcgccaagctcccagagccttcacctgcccctctctcttcctttgccagaagtcgtgaggatggtggtcaggaagattcagacagatggggtgcaaatcctgagcagccccttcccaattctaggacgctggacgggccagttgccctctagagtttctttatctgtaatggagaaggtcctaataatcacacctccttgaaaggggcgaggcctgagtgcagggatcccgggtgtgaaggacagggctgggggcctggaagtccagccacccccgtgacagggttttcttgaacttctgtaggttggtccaggatttggcactggtgggtgcacatgggcctggactgtccgaaatcgctctgtcctattcaggggacatttggatgcgcagggaccaaagcaggtgacctgctgtaggctgtgcagtgtatgtgcagtacagatggagaggctgctaggacttgggaggtggcacagatgaactcaccagggggtttagggaaggcttcctggaggaagaggagagctgaggggtgagcatttctggggaagcatggacaaaggccaagtagtgggaacgactctggcaggcagcggggaagagaggagaggctggtgttagggtctcagtgatgtggagatgggctcatggactcgttctggacccagtgagagaactgagccttctctctgaggtcatattcctgggaaaagactctgagactcttaagatttgcacacaggaggcctctgcatcatcttcagacaaagaggaaatcctagattttagcagggatgaggggctacttctgcaggctcagagagtttagtgggggtcaaggttcttgagtgcagtgattcagatgttcccatcctacaatgcagggccccacttctttgctgtcagggtcttggcctggccttggtgtaaccagcctgctgggattgaaactataaccccctgaggatctttgactcttgtgataaagtcctgtgcttttctgcctctggttgcagatgagaatcatcttatatcctgccaagggggcttctcatgttcacatttcaccgtaaatttgttttgaatcttactcagtcttgccttgtctttctccaaagcattgatagctcccagccacagccatcccattccatagttcttataattacacttccctgagcctgtctgacacctgagatgttgcacccattcacaggtatcccaagctggttcacaatgagcagttacatccatcacatgtcaggattgtcagggctccccctgcctccatggagaggttctcgtcagcacaacaatgcccactttagggttggccttctgggaccacttctggcaccagctccgatagggtccattccctggagtcagactctgagatggaggtcatgtgcaggtgtttactggagagtactcttgggaaccacacctgtgaggggtgaaggacgcagggttgggcagcaggaaaagttgggctgtgaggcattctcaagcctgagccaattccacagacagccctggaggtgggctggcccatcagagctgtccccattgaggccaagggaccaggcctctgtgcacccccactccacctctgtgaccacaggcagtggagccacatctgctcggggtacagcctggggagggactcggatgagaggagtcagcaggcaacacccttggcagtgaggggatgagggcctcgtgccgaaggggtaatctgggtgatgcagcccagcatccacatcatgagacttgtgcagcttggacccaggttctggttatgcctcttgccagcgctgaggcctcgggtgagtcacaagaactctctgaacccagtatcccacctgcaaaatggaccattgccacgcctccacctcctggggttggttaggagtggggtctgaggtgggctctgagacacagtgtgagcttgaagggtgcacctgtgggacagggccaggttccagtcaccatccaggtgggaactagggggcctctcagcaggctccccatcctctcactggacaggcccctggcagccaggtttgaggaaatgggagacatgggctaagtctgtaccatcgataaaacccatggaagttgtccaagcacttggtcaaggggccagggatgaaaatagtggaggggcatgcagagggtatctgctcagcctgctcagtgggttaattagcgtggatggaggtaggctgggttcaggggcctgaacttcaggatgactggtagtgttcaacaaagtgtcaggcagcctggggaggggccttaaaacagcccctgggccgtgcgtgttgactcatgcctgtaatcccagcactttgggaggccgaggtgggcagatcacctgaggtcaggagttcaagaccagcctggccaatatggtgaaacccatctttactaaaaatacaaaaaattagctgggcatggtggcgcacacctgtaatcccaggtactcgggaggctgaggcaggggaatcgcttgaacccagggggcagaggttgcaatgagccgagatcgcgccattgcactccagcctgggcaacaaaagtgaaactccgtctcaaaaaaaaacagcccctggtgggagggataaaagtgatgatggcagaggcagggtggctgtccatggagggggcactaagggccattggggtggatgaggagcccctacagaggtcatggactggtcacttttgaggcctctgtaggcacagtggttttgtacacaccacaaatgagtcctcatttccaagggccccatgtaggcggggagacagctcagaggcaggtcccatgtccaggactggcacagggtcagagcccctgggtcttgttggctaaggacacccgtgacatcggccagtgtggctggtgcggtggggtgtgacgtcggcgggcgtcttgcggatgtgactgtgggcagggaggggaggcctgccgatgggaagggaaggctctgagtcaggcatgcgcgcagcaggcctgccttttacaaacgatcatcagcctcagtgttccaacagcctctttcactctgtaaaagccttttctttggaaaaataaaagaagattggaggcaagtacaatatttggctgtggcggctgctaatttggcgctgaatgtcacctccgcctttctcttctctgatgccaagtgctcctttcctggctctggtgggcgagagcagggtgatgggggtgcagggcgggctccagagcctcttaagattcgagattcatttccttaaacacacattgtctcactccaatttcacgtccgagcagttctggcgaggaattagcagctcctgggagagagtggcgggttctgtttacacggggcgggggcagggtaggggaggcggtgcgggggtaggtggggcttggggcccatttgcacaggaagcccacacaggaactgggtcagggactgcctcacctgacccgagggccctcaaagggagccaggccgatccgctgtcaaaagaatgtgtgaatcctgccccattttagatgtcctgtgtgcatggaaggtggggctgtatagtgattttgggggcaaatcaagaatattgggctttcaggttggcctaagtctccactgagaggactggttgagacctgggggccacctttagcttgcccccttctgtggcttggggctcacaaactctggaggctgcagtttgctttgagtcaggctccatggacccctcctcacatggagcctcacctcccactatgtcccctccacagcccttgtgagcttgggtggtgacagtcctgtcattgtgtgggagaagcagctccacttcatgggtgaagccccagaacccagccctaggtctctctcccacctactcagtccctagggcccgggctgaatgcctgtgtctctgatggggagtgtggtgggcagtcctgggagtacaggctccccccgccccaggccaccctctcttcatggcctcaaggtcattctgagtgtggtgtggcggaggcatcacagggccacgctttaagacccttcttaatggtgtcctttcaggctgacactattttcatccctggccttgatttgggccttcttggctgggcttgtttttgtatggcttctgaggctgggtctgcccttttatgccctttctgccttccccatgcctaaaatccacagtcaccccctagtcccaaccactacccctgaggaatctcagcagggctgcgcagccatggaggtggcatcagggttgagcctaaggagtgctatggagggtggcccatcccccagctctcctgggcgactgctcatgcatcacctcctagaggggagacctgctaatttgtcagcccattagctgggcacgagcagcatatggacccaattcctgctaccctcttcctgcccacctctgatagcatcatcagggctcatggtgaggtcctaggtccagggttggatcacaggggtggggggctgccatcttgctccgaggctgagcccctcaatgaggcagccgagggtttgttcctctcttggcttcaacgaatctaccttaggagttcagtgatgaagcctctctaagccactggctaagaagggccctgcttttaggaaactgggctttatttttagtgttcagagaaagataattttttctcgcccaccatcagcaggaagatcagtcgttttcgtgatgtttccagatcctcttgtctgtgggatgggggtgggcaggaaggatcccttgcctgagggcttcgctgcggctctcccccacatgcaggagggaatctgtgcctcagactgtctctgttgcagcctgcgccatcaatggggtgttctcagggtctgtgggggtagtggctagaagcgggcaccagcacagtgtgggtggcctggctctagggatgtgaccagtgcagggctctagtccctctgaaatggtgggcagaagggcagggactggtctgcttgagggtaccctgggcctgtgcacacacacagatgttccctgagacctactgtgtgctgtacttgagcacaggagctcagggctgagctcaggaacacatgcaccttactttgttcattgcgagccttcccccaacatgcgccataaacctgggcatatacacaccaggatacatatgtgcatcgacacacaggcaccaggatatgtgagtacctggagacatacactgggtcatgtgcttgggcctgaggtgcccatggaagcaccatcacgcttcctatgtgctcaccagtgaacattcctacatacatgtacagatacactcaggcacacactggcttctgcatcatctgggtttatggcaggagataaatttgcagtttaggaaccctaaacctcccagcattgtaaactcaaagagcttgatagccagagcttccagtcacgttgatgactccacaaagcgtaatactatatgggagagggtttcccagcctcctttgcagggcaaccctgcagagcagaacatacccaggcctaactggtaaaggggcctgtccagggaatgcctgccctgtgccagggaggagccacatggttgccacctaggagcttcagcctagggcatctccagcattccctaagggccctagggtagggggaagtgatagcaactcagagggctcaaggccctgggggaggctaggttttgttcatggaggggacgggtagtccagaggccaggttgaggatatggctggtctgactcttagcctgttctggggcctaaaaaggagggctccctgcttagacctctgtggggcacttagaagagcgtacctgagccctgatccagtcagggtgtggcattctggatgtgaccttggttggattctggaagaggtcagagttccccaggctctgtggtgactggggcagggagaggcctggggtgtggagttctgggcaagcaggcagggaggctgccagctcagggtgcaggcaggaaacctggaggggctcatgtatgctcaaagacactggaggagcagtgactgagcaggaccaactcaggccacttgccccagtcacgccctgcaggccccaggggcggactgagtgagcctctgttgaggggtctcctagcaggcccagtggtatgggagggacatggggcaggggggaacctagctcccagttctctccctcctaaggaggaagtagagctgccttacataatcagggcaatttgttccgctcttgtcctcctggcgtcattgccctcaccgcctccttgctcagggagcccttgacagagctagaagtgcaggcctccctccttcctgctggaggttgccgacagacgatgtggaagcccagggcaccatcgcctccaagaccccatgggcacctgaccacgagaagggggcggtgggggagacaaggtcacactgcatgtggggatccaggcctccagcctgtagcctccagacgaccttacagtttctcagaattcacacaggcagtgagttcccggtgagggtcgggttcagagctgcccctgcctgctagtggatcccctcccccggaagctctcctcaccagccttccttcttcttcacctttgcatgctgctcctctgccgggaaggtacacaatctgttttggcccatccagctacacctttccctggaatgtcttctctgaccttcctagcacggaagaaggtgagaagctggagcctgggtcatcctggctctttgctgctgcttaccctgctgacttgggcctcagtttatgcacctgtagcctagggtcctagacttccaaccttacaaacgaagatggtttcctacaagtcgaagcacctccttgaagtctacctaccctctgggccagctcagaactgtccttggctctccctccccctgcaatccctctgggcacaggttgggcgaatgagccctcggggtctggtagacagcaccaggcaaatgaattaggggcttgttatcctgaagggactggcttcctgggagggttcacccaactgtctgagaaaaagctcttgatggatgttcaaaacaggatggggtttgtgaacccgagactcagctgaccccgctgactttcatagccctggtgcaggtggcccaatggacatggccaagggggcagtcagagtggcttcccaaaggaggggtcaggggcagggttgggcctgaagaggagttacaggatcccacaggctggagacagctgctggggagatggaggcagagtccgaaacagggtctgtgttcatgcatgtggtaagtccatgtagtcattgaattccagctctgccagttactctctgtgcctcagttgcctcatctgtaaaataaggacatctgtaaaataaggacaactggggctggtgagaatttgatgaaatggatggccggtgtggaggctcactttggccccgccagtaatggcagctaatcccgtaataattgtcacccaaccccacagcccccaaacctggcaacaaggaggtggcacacctggagtcagggcccaggcacagcatgtgcctcccctgagcatagcacacttaacttagaagttcatggctgttcaggctaagggccctcatggtgtttgccagtgtggccgggccatcagtcctgtttgcacagtttgtttgcatggcaaacactgtgcacggatgcgggaaggtaaatgctggcccctgttgctgctggagttttgcatacaccgagagagaacctggagctggaggtgccatggattgtccctcttccccaaaagtgaaataagggggaactgaggtacagaagggccagagcctgctcaggagcacctctatggactgggttcagagatcactgaccccagctctaggaaagctttgggtggtaaccccacccctgcatttttcaggtccaaaatgggagctttcttgtgagagcccaggataggctgtaaatgatgggagaagctgagttcccttgggtctgtgtccccagagtgcatgtgttttcagagcatgcatgtccctaatgtgcacctgtcctcagcatatcttcagtctatacacagccttagtgtcttggtcctgtttgtttatttatttatgcttccgacttgttctacagaagacttaagggcacttacaaggatacataaaattcaaggagagcctaaaaattggaagtaggagaaaaaggaaaacttagaggagggagtaagatggcatcaggaggtgctgacagaggaggtaaatgagatggcccaggcatggtgtgtccccttgcacacttgcttgcacattcacagtgactctggtgcctactgccttaccggtgccttgtggtcagctgcatcaagaactcagaagggggagcctagctgggctctcctgggaccctggttcagagtccactgtgggtcaggccatgcccttgccccatccaggtccggcacctatgctgttaggagcccttccaatggtgtgttcagcaggatttagggtcatgaccttcaggtagccccaaccgtccaagccagcaaagttccactgcttaaaacatctcagatggccacacaccactttttgaggtgtgaatggacacccacagagcctcacgcaggcctggggctgccatatatccagtgacagtggacaggcccatctaggctatggtaccttttctgtgagcctaagtgtgagacttgagcaagatctgcaaggggcttcctgagtcctaggtgtgaatgtggtgaggtcagtgtgtgtgacctggtatgcaaggtcaagtgcatgtgcctgctgctgcatctgtgcactggtacagggcaggtccctgggatcaccttgccccaaaagaggcccctgataccatgagaggacatgggctcatcttctgggcttaccttcatctctctacccttatctcccacacctgccatgctaagatctcatgttttcacaagagcagccagcctgagggcctcagcagcacctcttactgtgattggggctgtcgttggtgctgtctttatgtggtgacatctttagcaagtctcagcagcacaggacagaattccagcctgtgaggccgggaaagttggtccctgcaggacagaatggatcagggaaggtgctcagggccttgggagcaaccctggaaggcggtcccatgaaaagccaccagcaccccacacttgaacttccatctttaaggaatgccaggatggcctggctgaggtagctcagggctgtgcagactgtgagggtgaaggctcgagccaaaccacaaggctgcttaagggcagagcaggaattcagacccatggcttttggccattcttggctgtgggtgcaagagactgggaagtctcctctttggacagattctgaccctcccggcgcctcagtatcctcatctgtaagatgaaaagccagccagctgctgaccacctccagggtgcccttgttacagtcatctccacccccagggcctgactggtggctttggggcaaggtcagtttctagccactctggagtccttgggggacctgcccagcccctgaagaaggttgctcacctgacctatcagggttgtgaggggtggatggaggtgatacagagaaagcagattttgcccttttcttcctggcctcaattccgtctcatgagggtacttatgggggtgaatttctgccagctctgggctataaggactctgggccacaatgactgtttcatctcacatgagagctccatgacccgttgaaacccactggagctgtgacatgattgggagtcccccctggcccaccaagggtccactggagcctctgcccaccctggctcccagagcccttcactcccagcccactgtccctgagtcctgagaggtgggtaaagggggctttactttaacccattttacacatccgaagatgggggcacgagggtgaaggggttgaagaggccagatggcaaggcagcggcccaactctgggtctgtctacttgggctgttgtagggcagagggggccgtttgtcctgctgcgggggtagggtccttgtccaaggccaagctgggccagggctgcacaaggtggtgaacggactgaagggcaggccgggctagtctgcgggccagagaactgagcggcagcgggggcctggaactgatggctggggtctgagaagcccagtgccacaggcacctccactcactgcctggtagtctgcagccagtttctctatttcccagagctatcaaatgacaaggactccatgggttatgcgctgagccctgtctggccacacagaggacctgtcatcactatccccatccttctgcagtcaagaggctgaggagttctgatgaaaggaaggcagggccaactggatggggaggcagcgggagagagcagagccagggtgggtggcaagggggcccagacgccgacacaaacaatctgcttcccataaacatgggcgcccacaccagccggccgcacccggcgacttctgtgagttgggaaagtgcgggtatgtttactcgcactcccccgtgccagctggtatgctgggcacagcttccctcccagctgcctcgacagccggcggctcccaactcagggagggggagcaaacaggggcccctggttcttgcctgcggtttggttcacctcaggctcaaattccccacccgatgctattccaggccacattgagaggatgggggccctgagagtctccatggctggtgtccatgtggctgtgctgtgccagaattgtctcccctgctctccagcccatctgagtagacaaaggcctggaggctggaactgtccagggacgcttgtcttgagttcaggcaacagatgcccctccagtggggtccatgccctcctccctctaccccagctgctttctcagtagttgcttctctctggggtgtggtcagtgctccagtatctcagcacacccagaaccaatggatgacaattgcaggtgggtgaggttgcagggagccagtgccccatgggccctgggatatgtgggtctccatgcctcagattctctgctctgtgaattctgtgaataccttgtctgagtgccactcagcagtggcacctacatgaggtcgtgcatcatccccaggaggccagggcagattcttgtctgtgaaggtgtctccgtggtattgcaccacccaccccaaggcctgggtcaagcatcttagatcaaggagtggtgggagctcagaggcaggggctcagggaagctgcttggggaaagtgcttcttgggcaggcactcagcagcctacgctagagcattaacttgtgaccttggagatacatcgtggatggctttggtcctgcagcatttgttttgaggtacacaggagtgtgcctcatgctggcataggcaggcggggacactggagtgtgccccctctccagcccccttgcccagggccatttgggattgtcacttctgtagtagggagacctcatttgattctttctcactccaaacctgtccccaaagcatcctcgtgaccaccaagggagccagaatttaggggagataaagtcacagactgcaagcttcacataggcacacggccataggaatgctgttatctaacgatggcagcctggaatccagccacggtgcttgctaatgatgggtgagtcccttctcagcattcctgacagctgggctggaatagtccctgtggtggggggctcactacttatccaggtgttgctttcaggctttgggagtcctgagtgtgggaaagttcctcccacttccgagctggattctgcaaccctgttcacagaagccatcaggaaccttggagaaaggacctctcattttggagctgggtggataccatttccttctaggactgttctcccctgagatacaggccttaacactggaggcctcaagtcaggcctggtgtaaatggataatcaggattgccacagttttcaagtcagtttggaaattcgcgtatgtttcagaggagcaaagggctacacccaggaatgggccatgcccagtgtctctggtgggtggtgccttgcctgggggcacattcagggcaggcctcacaggcaggctctgcacaggggcaagcacagggaggttggcacagactggcccttgcttggctgggaggatttggtttattgttttgtgttgggttttgtgtcttttgaaaaacaagagattgagcctttttatgacatggattttacagcgtaacgaggcagcgtaatttcccattctcagcagcaagtgcactttttacactaattgcataattagacataatgtactaattgcggtaatggatgacagtcaactaaactttaactttaaaaacagggaggcgttgctgggggtggtggtgggggcttcaggcccctgtgagttttgtgaaggtaatcttgctggtgaaagctcctagaagttgcctcttgaggacgagggaccacagagccgccaggcctttctcaccttgtggtcagtcacatgtccctccttcctggaggatccccctgtccccaccacctgggtatctgctccccttgccctcacaccctgtctccccagcttctgtccccccacaagcccctctgcagccactgagcagtcccttatccccgcttctcccagcctttgcacctggcgctactgctgccaagcgtccctcgtccctgtccacccacaaaaacccctgcccagcctttcagactgctcagatgtcctctcccctggaaagccctccccaggctttttcttgccccctaccaccctggagcaggccagccccactcccaagtgtctcctgcacagctctgtctactgccacctgtctgggcatctgtcccctctggatagagagtcccaggagggcagggacgaggtctgttccatctctgctgttccagggggatgtaaggaggtgggggtgggggaggatagtgctattaatgggccgcccacccaggagaccaggccaggcaccctcctctctgctcccacactgctgtgtgacctccactgtagcccgtgcaggctgattgtaatggcctggttctgtgtctgtgatgccctctaaagagagcgttcatcccaggcattctgtactggatatgaaggggaattattaatgggacaactaacatcacagtgtacaaaacctgtgtgtgacaggacaccatatacagctgagtgaccatggggccaccccgcctgggatggtggcagtgtggcatggccacttaggaacctaacatggcagttggcaaaaatgtcagcagctgatgaagcatgtaactgagtggcacgcagcccccctgcctgggcaccgatagtgtgccctgagggctccaggggccccttgccctactgtaagccctgtgccaggctggtgagggacaggccttagccccctcctggggagctgccagtcacacacccagtctcgtggctggtgtgtccccagagcagccagattagggtttttgtgcacccatcatggggcagcccctcagtcccatcaagaactaggctatagggagagccctgaggggtgcagcctgtcctggatctgtcccaagtgctgtcagtggtagagggtccccaggtgcctggttaccccatcaactctccagtcttcaaggtggatttgcagttatgtcaataccctctattttctcactgaggcagaaggccaggttagcagcctagaaggggtgggtgaggcagggggcccggacctggctctaccctgactggctagggtccttgaactggtcactacctgtcgccaatcgccctacctcattggcccagctcaggcttcctgagccaccacaagccccctagccacccacccaacatccctgacatgagtgtagcccagtctggcagctgaccccggcctccaactgcagaccctgtggcctcttgaggtggttccctccccagggcttgtttatttgggttgggcctcaggaggcctcgcccacagtctctcatccactggctgccctccctgcaggggcctaatggacagttaagactttcacctggctgctccctgtggtgaaatgtggtgaggggattggagcgccagtctccccggagtcatgcctcggggctcaggccaggggtgctggagcacctggcaaaaccccaaggtgagctgggtctttgaggagacagctggcagcagggccaagcctgcgtcaaatctttcttgttccattttctttctgatttaattttccagagattagggctgttcaccttcgctgcggagaggagccttgcgtgcgagtgcctgttttgactcccagggttgggtgggtgcttagtcgattgggctggccctgccagtcttcccctcattcccctccagcatggccctcccaccttccaggggcctcagtctttcagcctctgcctgcatccgccccaagcccttcaggcctgcccagttcatccctatgcctcttttcccatggctttgccttcaagtttagggataaaggtggggtacagaactgtacaaagagtatgacctaaagcaagggctttggattcgacccagttcaaaccgcagttttgcatgcgccttaacctctctggccttcagtgtcctctctgccacatggagatgatcagaatggaccctcctcaggggttgtaggagatcagtgatgtcatctatgtaaaccacctgccccagagcagccagagctaacactcggggcaaacagggctgttcctgcagcttccttggcccttcctccttgcttttccccactctcctttcccctctcctctctccttttcctctccccttccatcttcccccttgccctaggcaggtttgctggtagctcaggtctgggctcccttgctgctgactttctaaaatgccttctgattggggcctgcccaggtcacttgtcctgaggcctttagtttcctgtggtggctgtctctatgttccaggcacgttggggctggtagttggactcctctctcccaggcagctctgttaggagctgtgggaacgaggctggctccctttgctcctgccagcatgcaggcttcctgtccaaggtcaccattcctgcaagggtcctccaggctcgcctcccacttacacggagccatgggggaagcaggaggctgggcagagggttcggggcttctaaggaggcatcagcccccacggccctgtgaagccctaggatggagggctggccggacttgccctgatgcctaactgaagaactgctagagctgagagagggttgaagctagagccagccctgggggaggggagaggtggaggggcaggtctccatcactggtgggataggagtgccctcaagggaggagggcaccagctgagccatggtcaccagtacatgaaacaagggggggaaccaggaattcctgggaacaaggggctccaaacagactcctgaattgtcccttgggacctcagccacccctgttctccctgttcctcagtcctcccccacatccccacctggctccagtctgctaccctgtcccaccagcatcctggcactctctgtgggttaaagctgctgcctctccctccctatcactgctggcacagagctggggcaccctgggatcagctgggccccgtcgtgctccttagtccagcagaggtggggctgtgccggctgtgctgctgtgggagcagttggctttttctaattaactctctgggccaaggacatcagtgggcattgccatcctgctgtggtggttgaggctctgcatccggtgcaccctggcctttctgcacttcccagctggccctaggagccagggctagaggctggggctggagtggggctagtcttgggcagagtctgtgcactggagttgccctgggctctcctgggctcctgctgggcctgcaggtggaaagcacctccctggaccacatcaatgtagagatgacctttctcccaggatgggaccatctgctgggctgtgtcacttagatctcctggggatttggggctcagctcagggcccaccctagaagacaggaacaattggagcaagttcaggggaatgttgagggggagggctgtggcactaggggctatcattcgaggactgttgcacctcaagggctcatttgggattggggagcaggcttggctggcagcatgaccagcccctgcacttctgggattctgctctcctctcagcagaaaccccttccagcccatttccctggccttgccctagagaggatttagatagcagggcaaggtggaggggatgcagggacagcgtgagtcaaagtatagctgtgggaactggcctgggctggagacccagaggcctgcaggcacatgacaggtcagtgggcttgatgggacccagaccagggtcggcagaaagatgctgtggtgggtcctcgagtagaaatagaacaggaagaaaacacggtggatgcatccctgggccccgagggctcatgcagccgcaggcagaagttgaggaatcagacctgggcccagctggccccagagctctgcttttggacatagaatccagcatatgcatttgccaggtgtccactgcacacagacatggtgcttgggagagagagaaggaagctggccatggctgtgccctatcagtggcgtcccagtgtctaggctccaccattatcacctctggggctgaggctaaggtgtcggagacaaggacagggtggctcagtgtgggagactgcccagaccgatctgggagaacggggtggggctggaggtgggcagaccccaggaaactgaggctaccagctcaggaatggagccgatggctttggacagccccaagtgtacagatctagcagggagagagtgggggcagggagggactatgattccatctgcagaattctggtgatcccaaactaatagccgtaacaacagcacaggctgctcaaggcatgggtttgctgtccccagcctgtgaggtgggtactactgttctctcatttaatagatcagtcacggaggttcagagatgagtgacttttggcagagtctcagcttccaaggcctcatgtcacctgttggtgccctgaggtgtgggcctgccacctagagacccactcactctgcagccccctgatccccagcacagttaccatgccaggctgcaaggggcaccctggagcccaagaggagggactcctggactttcccaggagaaccacatggtcctgcctcaggtcctggggctgtacacagccatggacagcccagactgtggctgcacctggtaatgaccttgacagagtctgaggtatgaacttcatcccaggccaggagaagccgggcagcagtgccccctgctggtgcaaatgggtcggggcaccactctccagaggcatcggtggatgtggctgagaccatggccacacacaccccagaatgatctgtcaaggatgggtgaaagctgatgggggatctggctttgccactcaatcgcctggccttgaccttccctctcctgtttctgtgcctcagtttccccaatagtaaggtgctaggctctaggttccctgcctttcctcagtgatcctcagggtctgacccctcctcaccctgtgtctctaacactgtctccctctgtgaacgtctgtcctgaggcagggcccaggggcccagggaacatcctggcctggcactcactcggggcctctcttctccctggccatgtggccaggcctcaagtctcgcccccttattgccactactctgcgggaaggagcgacttcaccacaaattattttgttctaaaagaaggacaaaaagaaaagagaagccgggagggatgggggtggcgggaggaggagaagattgcctgagctggctttgtgtggtgctttaacccctggactgccaggcactgggtagcagcagagcaggggctccagcagcacccaacccccccaccccatccccctgtcagatgacagggtcttatctccctgccttctcgctgtcactctaccgaccttatctctctctgcttgtctgtctttcatcggctgcctctcccccctccttatctcccctcatcacctcctctctgtctctccacatccctccacttctgctcagcctggtggcacggctcagtcgtggcagcctattctgtgacctctggtggtgaaggagcctgtacttggggcacagacctccttgggtcacctgaatgaacacatggacccagtcaggcttggagacacatgcagcagtatgtgatgcatacaaatgcacacacacacgcacacgcacacgcacacacccaagacccagctgtgaacaaagacacttgcagaaatctgctcctaagactcacaagcccctggggggttagagaccctcaccccaccccagccccaacacgcaggcacgtgcacacaaacggatatgttgagccctcacacacacacacacacacaccctcagatttacactgccacatgcacctgcccacagacccaccccccttggaggaaggctgggcagattcattctccccaacctgccccttcctccctggtgcccattccccatattctgtgccctgaatgacagaggagcccgtgggattgcccagagctcctgctagttcctgcaagtgccctggggcagcacccacaaaaaagggtccagatgcctgagcagcgtggaggcatggctgtgtgtgtgcccatgcatgggcgtgagcatcttctttttgggatggggtatgtggtgtgtgcttattgactccatctcgcctcaacctcctgcctcctctccagcccactcttcccctctgctattcacagttaccttgagctagtcgggggcagggctgctcatgaccctgaaatggggggccctgaggcccagagaaggcagtgacaaccccatcccaccaaccacaatgaccagcctaaactgggccctcatcccagatgcaagctacggagcccctggccttgccctgccttcaagtctgtgggggcgctggccttccatgccctctctcagaggccaaagacagggtctgggtgcgggtgaatactgtgctgaggtgagctgtgcagaggggtatgcagggcccatggcatgaggacgtgggaccacctggtctcacccctggcttctgcttccttccagatttacaaggacaaccggaacctgttcgaggtacaggagaatgagcctcagaagttggtggagaaggtggcaggggacattgagagccttctggacaggaaggtgcaggccctgaaggtaggtgtgtgttttgggggcaggggggcggcactgagggagggccaggtggagaggtcctgtaccatgagggcagtgtcctgagccttcatcacgtggccctcctgagttcagctgggccaacatcagcagggctgtgcccacgtggaatgtgggcagctgcggcaggaacaggatgatactatctggagtagctgcatgagaggtggtgacttggagtcttggggctctgtgtgatcctgaggctgggactggggcaggccctacccctccctccttccgggcctggggttttcccatccctctgggtccccaggtttgtttatgggtggtgccctggatgggcacctggccaggatagtgacctgctgctggtggagtttgcccctgaggtaggctgcaggctctcttggagggagtgtcgagggggctctgcaagccccacagagaaggccacgtaaggatgggggctgctctgcccatggctttgaatgtttctctgctcccccatctgggcctctatattcagagaggttgtgcctgtcagcctcagaccactatagttctgaggggtaacaggaatgcgctgggctgccatgacaaagcaggcagacccctgacactcagcccatcccagggagagtaggtgggatggggcttctcagctgccaagtgaccagggaaggtcatacgtaaatgagtgagaggcatccaagctccccccagatcagaggcataactgcagttgctccagcctgtgtcaaagacaaactaatccaataaaaaggagcaaagctgggcatggtgatgcacacctgtagtctcagctactcaggaggctgaggcttgagcccaggatttcaaattcgaggctgcagtgggccatgatcatgccactgcactccagcctgggcaatagagtaaaaacctcatctctttaaaaaaaaaacaaacaacaaaaaaaacggaataaagtctcctgatgcttgcttgctacaacatggatgaacccaaaaacattatgctaagtgaaagaagtcagttacaaaagaccacatattgtgtgatcccatttctatgaaatgtccagaataggcaaatccatagaaatggaaagtagatgcatgggtgcctgggaagggaagggatagggaaggcctgctaatgggtacagggtttctttttcggagtgatgaaaatattccaaaattagattgtggtgatggttgcacaactctgaatatactaaaaaccactgaattgtatactttatttgggtggatttgctggtgtataaattgtatctcaataaagcagtttttttaaatgagcaagtctacacaggctgtgcccaggctcaggccagggtcctggctgggttaagtcagggtggccaccccagcctacaccctgccatatccagtccccaagagagaaccagaatttccttctccaggagctgggccctgctgtcccccatgggatcccctgcctgtccctatgtgacctggggccatgaaataggtggagactgcttcttggggccagcttcccagagaaggtggactctgaggacctcccacccagaggacccagagcagggctccacccacccttcaggatctcctggacatgagtgtgggagacagcggggagcaggcagagccacgccttctgcagggatagcagcccattacgctcgcctctctcagccagtgcatcgcgccccaccttctcacctttctgaactgggcgtgcctggatgcccttctcctgcctttcccttgttctccgaccctgtctccaccccacttccttccagacccctcatttgcacactacttcctagctttgctgccccctgtccagtttacaaatgtgggcacccagccctgaacttgtgttggaactgtctgataaatgcgggaagggacagccctcaggcctttcggcctgccactcagccaggccggcacagcaggggtgctgagtggtggcagagacaagacgcctgacccaccctccatgcgtggagcccagggcccagcctcctgcccagccccttgggaatcacagggctggggtctctttccaagccacttcccccacccctaaaggaacaatcaactccgatagcttgggaggagcagccaaaggcctgaggtcctggtcccaaccctctccctgcaccccccttgctggactctgctatgtgagggagacagatgtctctcccttccactgcacctgcagcccagccatggcctgggacagtcggcactaaacagaaattattttcttttctttctttgttttttttttttttttttttgagacagacactctgtcacccaggctggagtatagtggtgcagtattggctcagtgcaacctccatctcctgagttcaagtgattcttgtggtttagcctcccaagtagctgggattacaggcgcccaccaccatgcccagctaatttatgtatttttagtagagacagcatttcactatgttggctaggctggtctcaaactcctgacctcaggtaatccacccaccttggcctcccaaagtgctgggattacaggcctgagccaccgcatctggcccagaaattattttttatgagaaatgatggggaaaggcatgtactgaccagacagatactcaccgtgtgctgagtctatcatgcatcattctcacagcaacccggagaaggaagccctggctaccttggcttcacagagggggacactgggactcagaggtgccatgcatcaggccaggatatggcagagccaagatttgaactcaggtctccctgactctgagccagccccttgactcccccacattattcctgaggcgtgcactgagcccatagctcatggcctcccagcgctcctgggcagtgaactcctcctgctgcagcacccctggctgtagacacacgagatgcttctgcccatatccccagaggagggggaggatcacccttccccctgcttggtcctaattgttgaagatgagctttggttttaattatgttttaaatgtgcttttaatcaagtcctggtccctttctcctttttcacatttgtttgcagtctgagtgtatatggagggagggctgttgggggactggacccccaccccccactacattgttcctctctccctggaccccatccagtaatccaatttaaatcctttgctctgggctggaattctaattgggggcttgcaaagagggagctgagcaacacaggacggaagttcattgtctcatctaatcagggacaatcagatgtttgtaacgagtttctccaagctgcaaagggtggttgctggggccaagagtcaggagggagcaggccagatcaggggccttgcaatgcaagcaaccagcatccccaagtctgggaaacaggccgggccctcagcttcagagacatggaggggtacctgtcttggaactttgactacctagggagatgggggcctctgaactaaggcccactctctcagagtcttgagtcctgggaggaatagggaggtgcctaagttcttatagcagacttggacccaaatcaggactctcctgccctcccagctgggtcctagtctacagcctggctctcaggaagaccaccccctcatcattacattcctcctccatctgttcaccaacatccgccaatggctactgtttaccatgccctgttcagggctgggggtgcagtgatgaaggacaggcccggtttctgcccttgtggaactctcagtccagtgctgtcccaggccttagtttctccccctatgaaataaggacatgagcaccctccctgcccagcacttctggtttcacaactccaggggcgtcaacttgtaaagaccacagtgtgaacaatctcttgaaggttgtgcccctgcagcaccatcctgtgctgtgtggctcagaggagaggccatgggggaagggaaggtactgcccaggattaggtgaggggtgaccccagtgggagagattccagcctcctctcagagacacagccaggggtatcgaggctcagcgggcttggttcctagagaaagggaagcccagggctaggacagcaaggccagagcaggttccagaaggacatcaacatggtggctagaaacctgctttccgggaggcccttttgcctccttcctcaaacaaaccagaggtggtgggaggccccgctaggaatctagcacctggagacaccagccccaggcttaagcccagcacccctcctaacatgcctgtgcccctcaggtccctcccattgtcctaagggtcagacctttgccttagtgcagcatttctgaaccctggttgcacattggaattgtctaaggagcttctaaaattatggcacccagcttctgcttcagatcaagcgcatcagattctcggggggtcagcaggggtggaggggcggggcatcaggatgttttaacgtgccacagatgattctgtgtagattcagagttcagggattttttttttttttcgagacggagtctcactctgtcgcccagcctggagtgcagtggcatgatctcggcttactgtaagctccgcctcccgggttcacgccattcttccgcctcagcctcccgagtagctgggactacaggtgcctgccaccacgcctggctaattttttttttttttttttttttttttttgtatttttagtagagatggggtttcaccatgttaggatggtctcgatctcctgacctcgtgatccgcccgtctcggcctcccaaagtgctgggattactggcgtgagccaccgcgcccggccagagttcaggatttttcccagaaaatggtcgaaatctttacttcccaggattactggcctctgagtgcccaccaagtgccggacctgaaataagcctgcatgctctgtattgctctgaatcctcacacaggtcgctgggttactctcctctctctattttacgttttgaggaaactgagcttcagagagcttaagccacttgctccaggtctcacagcaaaaccagggtttatttatttaggagacagagtcttgctctgtcacccaggctggagcgcagtggtgggatttcagctcactgcaacctctgcctccgaagttcaagcaattctcatgcctcagcctcccaggtagccgggattacaggtgtgtgtcaccatgcctggctatttttttgtgttttagtagagctggggtttcgctatgttgcgcaggctggtctcgaactcctgggctcaggcaacctgcgcgcctcggcctcccaaagtgctaggattacaggtgtgagccacggcacctggccaaaaccagggtttaaatccagatagttgggctccagaccccacaaatggctccccagccactgccctcctctgtgctaccattagtggccatgtggtgtttgctgtccagagtgggacagggtcaagggaataggagatgggacactggtttcctctgacaggggcttgctctctgatgacctagtgaccttgggcaagtccctgccccctcagtttcttccttgggcagtgaagacaagacactgagcacccctcccacacccccatgaggctcagatggatgggagggggcggcatgcagttctggccttggttctaggggctccagtgggcattgttcccaccattggtggcctctctggggaatgagcatcatttaaagagtaaaattaaaaacccttctgcacacagccgccctgcttttgctgctaatggccacttaacccaattaaagtgatgcattgttggcagtgtgaccgggtctgttcaggaactgggctctgggctgggcattcagaggggcaggaggtgtgagccagggagggagtcagggactgtggggcagcagaccgctccctttgtcaggaaggagaccatcctacccagctcccacctcctttctaaagccttatctaaagcagggcgtcagcctcggcactgctgacatcttgagctgcatcctgctttgcggtggggctgccttgtgcactgtgggatgttcagcagcacccttgccctctacccactagatgccagcagtacaccactctcccagttgtcatgaccaaaaatatttctaaataccgccaaatgttgcctgggggcaaagttgccccagttgagaaccactggcctaacgggacagagatgcagccatgagagccacagcagggagatactgggggcctcggagaggtgcaggcagaagggccagcaggagaaagatcccttcagtccaaagaggtcacaggaaggctgcctggaggaggcagcaagatgttggggaaagtttggcactgaggcagctggaggccagttcagctgagtccacgggtgcattcactgacgagggtgagacaaacaggttggcccctggaggaccaggccatggatgtcgcctactgccaaggcctggcctggaacagaacacgagttctgcaaactggtgaacatttgtagaacagttgccagcgctgtggctctgggttgtggctggggctcagcctctgggatctgactccacactagggaagctctaaaaggtgcagtaatggtagatggacaggcaggaaatcctgtggcattggctgcctcctcccacccttctctgggcaattaaaaggtgtttatgtggggctggtgatggcttctgcctcccctccattatgaacattaagagatcttgacccttccactctcctgctctggaaaggagccgcagacacgtggagccaattaggcgcacgcgtgggcgccaagcgcccaagcagccttttctccctgattgcggcgtttacagctgattattctcccctcacccaaacagtgccgctgcttcctggcaagttgccgcccacaggagccagctgggggtccccagggatgggggaagcattggggattgggaatctgttggacacccattgtgtgggcacccttggggccctccgcctacagagggaggcagccaaagagctggctggcaaggagataaggaagggacttggtggtgaacgctaggagaaaccagggagcatgcggtggcagagcgaccaccaaggaatgggagtcagagagggctccttggacgaggtggcctggatgtctgcggaagggacggtaaacccaagtgtccctggggtcagcgtgagccttgggcaaagacgctacccccaacagctggacatgagtgtggggacggcctcccctgcctgcatctctgtctggcagtcgagaatcctgagaccccttgaaggcctccagctgggagctggtctccctgggaaggtcaagggagacagtgcaggtgggacatggctgggacatggccaagggtcctcaagagaaatagtcattctcttgtcttcagccacccgcctgagctagtggtggtcagacaagggcctggcccagcctgccaggccttgggaaaggttgacttgtggatttggggctaagcttctctggcccctgaaactgctccgtggagcaggcccttctcctgggacctcctccaagatgcagggacctcaggaggggtcagaagcgctgtgatcattcctgactagcacctactagtcaaaataagggtctagggggctggtgtgcaacactcctgaggcccacagagcctgatgggtcagccccaccacctgtacccagccaccgaattctccctagtggctgaagttcagaggaagggattgactgcaggcatgtgtcgggcctggaagctcaacaccttgggtgtcctgactggtgtcaccccacctcctgtggggacaccttggctgagctgccccaggcccagctctcactgcaagagcctgtcccaccctacggccttgcttttgatgccaggtgcctcccctgggagtgccatgcagcctccctggctttcacttgctcactcagtcattcagcaaacctctgctgccccagcctggccctaggccttgtgtgattccagtctctacttgctgtggggcagaatgcccgttttacagatgagaaaacagagtcggagactagatgtcaaccctggtcactgcctgggtgaggcaacgtcacagttccccttgcttaccctggctcctgagcctgtgtacctgccctcccagagctcccagggattgggaggaagtagagtggtgctgactggggcaaaggggaaggccaggggaggaagggaaggtgagaaagccgggtggagggcagagcatgagcaagggcctagaggcaggacctcgactgggggttgctggggagcagctggagaggatggccagtcccactcagagaaggctccaagtgcaggctgggagctgttgccccgagtttcctttttaatacccttgcacctcaccaccagaggagaggaatccaggacagggagatgagagtccgttgaatggagaaaatgaaccccagggagggagatgtatgtgtctccactccccagagaaggcctgcgtagagggaggatcccctgatggtgcccacttctccgggggtcccaggtggcgaagggagcagatgcaaagaggtggagggaaagggcctgcaggtgccacagggacaaaccagcctaatttaggatcagagaagtaagaattttaattgagttttaatagtgtctggcccttcgttctgaaatcctggtgtgcgaggctgggggagggtaggtgcatgtgaggaagggcgagccggtggccaggatgatccctgccctcgggcccagacttcaaggagatggggaacaggctgtggggtcccaatgtgcagagcagctaacatgggacaggcaagtctaagaagacagcctggaggaggtagcatttgagctgagccttggaaggcaggtggaatttccaaagatagaagaaaggaagaaggaaggcatcttagtagagttcccagcctgggcactggcttagcagtgagagtgagcagaactgactcaggctgaatctgctgagatgggagtactgggggctgggaggggaacctggaaggtttggcctgggcatcagtttccactgcaggggagagggtgtgtgggggtgacagaggcagggcacagggttctacgcctgagttctggggtggtagctgcatatccacaagcttggccctgtggaagcatggccctgggagcggccagtcacttctctggccccactttctgtgccttaaaatacatagcgagcgatgcctctctgtggcagtgggtacctgtgggaggtaccttggcttacaggggtgctgctggggaaggccagtgccacagacccaggtagggggatagggtggcaagaaggccctcgggaccctcctagaccctcagctgtcttccccaagctaacccctgaggtttcactggctccaggtgccatggtgacccgggcaggggcacctgaggttttcctggaagagactccaccttgaccctggctcctcctgtcctgggatactgggtgcctcaggttccgttgcttcagcttctgtttactgagcactggcccttgctgtgtgctggcatcgtagtaggttaccaggtacggggacagcacgaatagacctgctaggcccctcccttgaggagtgcagtctgctgaagatggcagtgatgcataccacaaagggtggagccatggggcaagcccatggggatacttgaccaggcctaggggacctgggaggagggaggatttagctaggcaagggagaataagggagcaagaaggcccaaggtcctgaggtggagagcgcgtgcgtgtgtgttggggtgcatgcatgcagtggcagagggtcttgcccactggcaggctccacagagcacatgtgcagatgcagtgtgaggccagtctccctggggtacacggggctccctggggtctagccgagaccccatccagggaccacatcccacacagtccagaccttgcactgccccaaaaaagaacctgtggccaagggtccctcttaggcaggtgcagcatggcacggggtgcccatgaccagaaccagagcatagaaggtagccaagaagcaaagccctcacacaccctgtgctgcatcccccactcacacttgagcagcactgagcccttggcaaacctcacactctgtgagcctcagtttccctaccagtacagttggaacaggtatggccgcacagatctgtcatcagagtttatgcccaggctttggtgacaccagtccagggagggatgcttctgggggtattgcgtggggcaggccccgcagacagatggatctgtcctcctttagctccgccccgtgtgtagaacaatcctgggctgcagggcctcctgccagccttcccctctttgggggccttgtcaagggccctgtccccacctcccatctctgagggccaaagtatccagctgctcgaagcttcctgcctcctggcacaggcctgggggcccttgtttgagaggctgggcacggttgtcgggccctttgttgcagcctcctgtgtttgcccactctgtgccttgacaaatgggagttgcagcatgtttgctgtgtcaacaccagctggagcccagttacggagatcagctagggcaagacgccccatccttcagcctcccagatgcctagggtccagcccctccctggacagggttggtggacaagtgggcagctctccattcttgattcacatattcatcccacaggactgccaagtgcaggctgggcaggcatctgaaaccagcaggggcagccctaggcaatggggtgggacttagaaaaggtcagcagggcaggcagtctctacctggcacagcagccatgaagtctttgaagattcagtgtggggcttcccagccttctattcaagatccctctgagcagcccttgctgctctctcctcccctgtgtccccagtcatcaggtctggcagcctccgaggagaggagccttaggtggtcaagcaaatggacagaagaacagacagatagccagtgaggcagggtcagggcaggggatgggactgccgggatggggcttgaggagaccaggaaccaggcaagctgagatccatccatgagctgcgtaggcataggccaggggtcagggagccacagccctggggagggcagaaatgagcagctttggttggtgactggcactgaggggcagctgtcagagacagatgggggaacaggggaccagaaaggggaagcagcttaccctgggtctggggggaacctgggttctttcacttcagccaacgctgctccaccacttagggaccaggtctgttggccgcgtagcagagctgggccaactaaatcctgtttacttctgaaataagaccccccacccacttcataagtaggttttccagaaatgagtctgtgagggtgactcggcttccagggcagcatggatcaggcaactggatgaagagggagaagcgccaggcgagattgcagctacagcactgacccatcagccttgtggcctttgccagtgatttcctttttctccccagtttccccatctgtagatgggcagtaagagtccacctggtaggactgccagtggggtcttctgaggggaagtgtggtcagcatgcagatcgcctgtgccgtgtggctatcgctattgaaagaaggggtctcacatttttctgagcttgcatcttggatcctttgctccaggagggggcttggcagggaagatccctgtcacttgactccactttgagattctgtgaaaaagtgtcctagttacctggaagcacagggaaggggcattgaggctgaggctagagggaaggagggagtttgcacctcagagcagggaggagcattctgacaaagggaacagcctgtggcaacctgggggagtggagtggaagatctggcagaatccagggcggcctccagcttccactgtgtggggagccaggttccaagttctgaactggggtgggcagttagactccagtccacaggaagtggggtggtcagggtggaggcctttgtagttgtcaggggaggggtcagaggcctgaagccagagctagggctgcagggatgtcggggttgactcaggataaggtgaggcagccagggagggatggtccgtgacagctcctggtgctaaagaggatggagggtagaagcagtgcctttgggtcaggggatctctggcgggagcagactgcagggtgagaaggcagaacccccaggaaccaacgtggatggtcaggaagcaggcagtgcctcctgcctgcctctcgtattccttcctcagatgtctgccgacacctccccaggaggcagccagtgaactggtggggtgcatcagtgagcagttcccagtcacttggggtcagagggcatggcctttcccctggactcactcacatcctggggtcctggtgcaagtgtagcatcatgttcctggccagagttctgaggggcttgaagcttttctgagtttgcaccttggacccttggctccaggtgctggaggcctcgtggccctgctgggggatagtttttagaatgatgggcttcagagtcccagatcatcttcctgtgtccctgtagtaccaagggctgaagagttggggagcagggcaccatggggtgggaggagtgccctgggctgatgcatccccaccacgagtcaggtgagagagttgggaagaccctgtccccaggcccagcaggttagtagtaaacatttaaagagagaaaatggacccatctgtgcttcatctatggacagcagtgacaccccagccttgtgactgtggcctgggtgaggggggcaactgcaccagttgcaccagaagcaccagtccccacaatctcctcagggtgaccctgacctttccctgccacccatttgcatacctgggctcccttttatcaaatattcttctgctaatcccatctccctgcgtgactgccctgtaattagctcactttgcaaaatatgatgtctgtcatagttccccctccacgtttttcttttcccaggaaagggtaaggagggaatgggatgaagaaagatttctggatgtggggccacctcacaggtgagctctggccccctccccagcacacagggcccctcaacacatgccccagctcagctccagagcctggagagccaatggaggtcagtgagcagggcctgagggtgtcagagacctcccagaacccaggggaagggatggcacaggcctgactgagccctgccccaggagtgcccatgtaccctattcacacctgggaactgcccaggcccaggctgggctaagactaatgagatactaagtggcctttcccactcacagcctggcacatgagggcatgtgtgtgacaggcaggctgggggcaaggaggaaggggtgagggggccaggacgccagcattgcctctactcagcacatatagccacacatggatgggctgtgccagttgccaggcatgcagcaaacacagctgacaggaaccccagtgatcgtcgccatcatctgtccgtccacctacctgtcagacaacttcccatagctggtgggctgcctggagcccccacaccctcccactctccaccctgaccaaggtttggttcatctctcaggaaggggctgccaggggctgtggactatgcacagggtatgtatacagccccgcagtgggtcatatgtggcccaagccttggccctgaccaagcatcacaactccagccaggccaccaggcagagggagcagcacagcagtttaagctgttttcaagtcagtatttggtgctaccctagccacagcaccactgctgagcccccaccactccccacatggaaaaccagaggctgctgaggccccatctgcacagagggccccgtgcagctcagagcctgccacattgatggaccccagccgggcaggggcagctgggaggaccatgcatggagccttcagctggcatggcctacttttctgctctcccccttgctgccccatcagctcccctccttctcttactgcgactccctcgggatgtcaggacgtgaattctctttaacttttaattaaaaatcttctcctttctccccacaaggttcacttcactgtgattttcctcttagaaggagaggtggagggaagagagacggcaggcaaggagcagaggccaggccttccgcgtctccgcgggggacctggggaagcagggcctggccccagggaactgctggccaccctctcccctgtggcaccctctgtggcttcccatcatgccaggggaggcatttcttttcttttttcccctaaagcctacagcacccagttttcccatgtggtctcccattccagtactaaccaggcctgaccctgcttagcttttgagatcagaagagatagtgcacgttcagagcggtacagccatagatgtgcagggaggcgtctgagggttccaaccctaggtgtcgctgccagatatgggaaacggcaccagctcctgagggctctgtgtgtgcttccgccacatcctgcatactcacttaaggctacagcatgtgcccattaaacaggccgggatttcctcaagtagaaggggccccgactttcccatgagggtgcttttaactctggtagcttcaggttcactcccgagcccaatggtcataggatgggaagggcccacagggttattcatcaagtgagaagcagcccaggtttggtgtcatgggcctcaaggtcaccaacggggtcaccaatgtttcccttgtagaattcccgactcagagctccaaccatggtgtcaggtcctggctcatgtggtcaggaccccaggtatgctagagacccaggtccttgacctcaggcagccagaacaacatctctaattatggggctggagaagggctggcccatccccctttccgaggcagtgatccgttagcccatccctaactctgaagggagatgccaccatgtcctcaggtccctgttttagagagggagcccactaaatggaagttcttccttgtatgataccatgatgcctcttgcaaaagcctaagcctctttccgtggctccgcctctagagaacttcagctgagactccccctcccataatctctccctggcccaggaaatagggattgagtcaccagctccccatgttcctctcacctcccccactcctctgcaggctgagcaactccatcttagggcttccagatacagcccagagcacacagactcatccaggatcatcccccaactcccacactgagacgctgctccccatggttgcatatctccctcccccagaggccaggctcccctccatacccgcaaaggctcagggactcaaaatcccagccatgccccagctgtgagggagaaacaggggaaccccctcaaggcccatgcctctgaggggccccacccctgcattcctccatccctccacctcattctccctctccaccctgcagcagccagtggacacagctgggcatcatggggagcaccaggatgccgcagagaagaggcggccatggccctgtggagctagaacaaagatccctgcacactggccccccaagctgccctgcattcccctcctgaggcttcctgcacatgccctgcttcacagaccctgaggacaccctgaccggccctgggagtgctcagggagacatccccaaggagttgagtgggcctgtggcaagatttgggaatgggtgaaattagaattagccaggaagagggaagggcaggccacgtaggggcatagcacaagcaaaggcaggaaggggcttgcacaggggcctggttggagttcggggcagtggagggccaagaaggtagaaagagcagtgggaactttgaacaccacacagggatttcaaccctggcattggacactctggaagccctttgagtaaggcaggggtgttacttgttcattttacagacacatgttgagcacctactgtgtgtccttccctggtccagccccaggcagtgccctcttctgcggctctgcagatggcgaggtgggggtgatcacagagaaggagcctatgatccctcacagggcagggtgcggtctctttgggccaataggagcacaagtacagtcctgcctctcacagcactgccaccacctcccatctggctccttcgcggggcccattaatttccaaacctgatacaggcagggatgtgtggctcttcctcccactgtagcacatgttggtgctccctgaaccccatcctgccaggctccacccatccattcattccccacgtacacactaagtgtctactgtgtgccagatcctgcactagttgctggggactgcacagcgacaggtcggcctggtcctgccctcagggaccttgtgggccaggcaggaagcaaagtagatgagtaatgtgagaatgcataatgggctgtcataggtgccagaggacaagcagcaggggggcaaggagagggtgctggtgccctccccacatccacaggtgcaaacctggagcctgcacaggcatgaagacagtgaggaggaggaggaggaggcatgccttcctcctggctctgggcctgcgccccacctacccaccggtgatccagcttcctgaggatctgtggggtcctccccgctgcccagccctgtgagggagcaggtggggaaaggtgcagtgtaggcacagcagacggcgctggaccatcctgggttaccagccccaggccaccctgagcagctgctgatgtcagcaaaagagaccccccaagtgccctttagagttcacaagcaagggttgcagggcctgcctaggccagaaacaagcagggtgtctgtcagctcatgggggttgtcatgtggttgggatgtgccctgtgtggatatcaggcatggtgctgggtagatatgtgtgcctgtatgtatggctaaggtgtgggccagggccacaatggcagagcctgcatgtatgggggtgtgtgagtgagacatgtgtctacaccagaagagtctgaggagatggggtgggaggagaagggagagctccaccacctcaaagttcctgctgcaccaacagtctcatctcacaggctctcatgtgggcatgcttcaggcacccacaagtgcatgtataaaacccatgggcacacatttctccctgttcttcccctgtctgcaaccacaggagcacacgtagagcccatgtccccatgtggaacctgcagtggacatgcacacacacgtgaatgggatacatgtgcacatgtgcatctcagcccatcatgcccacgtgtatctgtgtgcacccgatgggcacacacacacactttcactcctggtgtgcagccctatcacagctgtgatatccctttctccacttgcctcacctctgcacctagaggtgggcaggtccaagatgaagatctctattttacagactggaaaacaggctcagaaaggaaaagagacttgcccgagaccacactgtggctccgcggctccagccgggacccaggtcttctggcttcccagctaggtctaacgtggccccactgcatgtgctgtgatctccacattcctctgcacagcccctggggcccaggacagagcaggggttttcagagccccccaccattcctgtctgccctcccctcaggggggcaccctggagcccagagtggggagtgccaaatcaggggtcaccccgccgtggagctctgagctcacaaccataacagtttgggaaggagaaacatttctctgggccttgtgtaccacctaaaggtggcctataggagaaatagaggtctcagccgggcctctgctgctagccccatcactcctagctctatctcaccctcctcctttcttcctgggaatctctcccctcacgctgcatccttctggtcctgtcttctgtcttgcccctccaaaattccctctaccctccaggggtgtttctgtgtttgtttcagcagctcctgacattcccaactgggaagctctcagagatgggccattctccaagccccaaatgggctcagccctggccgaaggagggacaaggaagaatcagtccccaacatgacctcaagaaaatctggtgcagagtggccacctctgtaaatcagctgatgcctgcaccactgtaaccacagctgttgacaggctgcagggcagaagctaagcaggaagaggcccagagcagagggcaagtgagcacggcagtaagaagttgaaaaccattaattgtccgtccagaggaggcggatgcccacaacattctgggcaaaggagatggtgtgtgcaaaagcacggaggtgtgagaatatagcatagtagacattcatcattcctttctcatgcactggagtgtctgtgcagccagggtcctcccattcattcattgattcattcacctgtttattcaccaaatagttaccaagtgctgggcaccctctggaatggggaaaaacaaacagcattgttcctgcctcagagagtgcacagcctgttaggaaattgcaggacagagcagtgagttccttggtgaggggcacacaggcactgtgggaacctggaacagaggacctgatggggacacacagacacctcaggagcccatggtaaccccaaggaggggtctgggcaggaccagggcttatcagcaacttttttttcatttgtcagcctttgatatccgatcttcagcggctctcataggtgacaggaccgttagcagtccaggtctgtgtccttcattgcacagatggtgaatctgcagccctaggcctggaactcaagtctccaggactcctgtttccagagtataattgtattgacaaagctcatccatagtcaaacccaaccctggacccacacggggctcagctctctctgcacagcaccttctgtagcccaaaagtggaattgcagacccaggacactgcttctctggcagagccagccctggctgggctccctcacatcggagcctgtgccctcagtctagcaggagccactgggggccttgggcatttcattggccgtcagtgtcccaccacagaatgtcaacaggattcctagcctgcctatcacactgggtggctgtggagatggagagtgttggcccccatgacccgcgttctccgggaggcctttctgctgaggggaggaaagacgggcccatggctggctttccctcctcctcagtgcctctgaagccatgcgtcacttacaaattctcttcatttctaaataaaatgatttgttaatttgagtgagtgatcactgtgcgcctgagcctctttgcaggcccaggaacagcttgtgggctcccggagccctgcgccgccggcctggcgcagacttggaggggttgttttcgatttaaatgtgaattgaatgaggagaaaaatgtttctcttggcaatttcataggagctcgctcttctgacagatgttggagtttattatcccatcgggccagcgttttgtagagcagaattgctaattatttcagaggcctggccacagccgaagaaggaagggcagtagtgggtgcagctttgggcggcatctgtcaacagggctaggcaggcactgggatgagacacccagcctgccacccttccactgccctcccaggatctgctattgttttggaaggggggctgccctgtcccttggtttctgtttcatggtttaccctagaggaggcagcagggtctgctcttgccagccctgctttgacctcatgttgaggactctggaaggtatttttggggtcttaaattgcttgtttgtttagagagtccacaggttgtggatgagaagactgcagagaccccagtggttttctccctgtgtgaaggcagagctgttcactgtaaggaccatacctgggcttggccacgcttgcacggtgcgggtatgtggctcggtggctctctaaccttgggctctgtgtgggcctgtgggggttgggcatgactgtgtgctgtttttgcgggtccagagctgcctggcgtgactgcatgcatctgtgaatgagatgtctgtagctgtgctgcatgggcctcagaggtatggttctatctaactcatttctgtccctgcactgcaaggtaaaggaggctttggaagacagatggccagagggcactagacatcagaaggaatgggccaagactggctcagctactttagggatgtcccaggtttcaagggggctgcatggcaaactgactaggggggtgggtttcatgggggaaatggggccctggcaaccgaaaccctggcttctgcttcatgcagctgaggagccttttatttatttattttttgagacggagtctcaatctgtcacccaagttagaatgcagtggcacggtctcggctcactgcaacctctgcctcccaaagtcaagtgactctcctgcctcatcctcccaagtaactgggattacaggcgtgcgtcaccacacccggctaatttatgtatttttagtagagttggggtttcgccatgttggccagtctggtctcgaactcctggcctcaagtgatccacccacctcagcctcccaaagtgctgggattacaggggtgagccaccatgctcagccagcctagggacctcaacctcacttggggcaacttacaacggggaagcatcccaccctcccagcagaggcctcaagagtcccgcagtgcttggtccagaggcctcctgactccacacagccatggcccaattccagttaatggtctctgacccagggctgagggtcaggggttggagagagttggtagaagaggcaacagttccccctgcagtattctctgaaaaccacccccactgaggaacaccctcacttctgccctattcttacccccatctctccttcctgagccctgagacaaggcaccagataccctgactgcccccagtcctggccagctcaggattcaggcctctcccttccccctcctcatgctccaccaccacccccctaccccaaccagctccgcttcctaggtttaacacagaggtggcagcggcagcagcagctgggtgggattttataaccctaattcacactgatcccctggggccctagctctagactcctcatgcagcctgagaccagcagagcacaaggtggggagggtccaccctcgtgccaggtgagggaagatggagactcggcctctccctgtcccaagtcctgggccctggcagtcaccctaatagagggcaccgggagaccagggagggggtgcccagcacccccccaggctgagatggtgccagacatctctgaccatgagtccctgacaaccaggccctctcccctccagataaaactccacggtgacatccttccattaaatagggcatgttcagaaaagaaaattgctactgttttccccttttacttcactgtcatcaaaaattgatcccatattgcatccttatttcaaagaacgagctaaaaaaataaaatagaaattcccactcctcagagcagcagctgcatcaagcctcccccacccctatcctctccctccccaccccctgcaaaaaaaagaaaagaaaaacatggccaatgagggaaggcgcctgctggccgcctagggctgttgagtgcccatggctttgggatgcacgagacctgggagcaaggaggggctcagcacgtgactgtgcaggcagaaggggatttcgatctggtgaaatgtggtagaaaatggggtaattgggggaggttaatttggatctaaatggagcgattcgttatctcaataagaaatgtctcgttttccagggagacggctgcgcctgccagatgctggcctgcccaccattggggtggtggctcagagcagggcccacagccagcctagcctcacagggcaacccaccctgcccagatgtgggggttgtgggcagagatagcttaatttggttgattccccaactcatttggcaaagtattaattagctcttctcaaaagcacatccagtaaaattgcagaatatgagtaacaatgacggggcagaggccgaggtgagcagcctgcagactaggcacttgctctagctgagcccatgggctcaccctgagcctcctggaagtcaagggagacctacccagtgttttgtgttctaaccagaggagaagcccagcgtggcttgccatgggaaggtgtttgggggttgtggggggatttccaggatggtgcccctcagcccatgcacctttgctaggagcagggtctgggagctggcacctggactgtagtgtgaccctgggcatgttgctcctccccaagcctcagagccccattcgttctttcccaggggccacaggcagaggctgctggcagtgctgggagtcctggtcacacaggtgtgaccatctcaggctgcagcttggaaggcctgggctcagcagctgaacagacttaggtgtgggctccagcttctccttctgccaggtttgtggacttggagcactcactacattgttttgagcttcctccttctgaaaaatggattaagtagcaccagccttgtgcccctatgattgtgacagtcacatatggacaacaggtacccataagtgaaaactagaatcacaaaagcatctggtggacagtcggttgggagctggcgcacaagatttccttggtctagcctggtattggctgcactgtgtctggaatggagctgggggagagtgagcatggagacaagcggaagcccctcccctccactctggtggggccagatctgactcatcctatgtctctagcaccaagtgcagaccacggacatggtagcagaaagaagaaaagccctggagactgaggccctttccttttattccacactgtagtgttggttgagataacacaaaacaaaatgatcacaggctggtgtgagggctgggagggaggtgaagcaatgaacaaattgagggcacatttgaggagcggtcccctgggtgagggccagacaggtcatagccaagaagctccatttggccaggcatgagtgggcaggtggtggagcctataggtcctggagccacagcccagtgagccaccccacacacagccccaacaggaacagcccttccctgcctgtgcctcaggaggggagttctggatgttaaagttgttggtgaaccaaaagcaaggacccagacaccatatgcacgtgtgcctgagcacatgttggcagcatggatgtgctttcccatgtctgcacatgtgcacatgtgtttatgtacacacacacacatcctccttctctaactccaggccctccacccccaggatttcaaagctgttgacctcaaagtcagatggaagaaacctcctcacccactcccactaaagccacagacctctgacatcaccttgtttggaacagctccctccgtggacacccaagaggcctggtcacaggggtcccacttaccccctttcccttggaggagtcctgcagcggagtggccttgtgggcaggagagcaacataggactctggagtgctgaaaagagctcaacccaggagtgggctggcaggcctgggccaggcagagcagtgggctgggaatcaggtggcccagaggccttgcataccttgtgtgggttgaggctgggctgactctggggcacaaagacaacacccccccccccatcccagggagcacccagctctgtgggttcggggaagggacaccaaccccaaggtagtgagcatgctctgtgcttagcctcactgcctcctgctcacactaggggatcccccttctgcagagcctcggtttcttcacctgtgagaatgagtgaggatggctcacaacagaacttctgtcagcctttctatgcaagagtggccctggggtctgcccagccttctgaggggatggtcctgtcccagagtttctgccctgccctttttccagacaacagtctttgatctaggcagggccaagcacagccgcccccaaagggtcactgggctcaacactgacccccagcagtgtccccagcactgatgccatgtgggcttgacctgagcctggcagcaggctaaccacaggtagaagagggttcttgggggccagagctcgctgggtggccttggggagtgtatacaactccctgccttcttcaaggacccctcctgcctcctctggcctcagtctatgctctgggaaagtagcaagaactccaaggccacatgggaagacaagtgccctgagatcgtggagggaatctgaggcagagcttggaccctctcaggtctcctcgtgcccgctgggtccatccccagccacacagtgtctcccactccacgctgtctgatccacagccagccagaggcccacttcctcctcagagagggctcagggtgtctcctgggctaatcggcaagtaggggagggggacttgatgacacagcccaggttcaaccttccaccctgccctcagagagccgtggccacagataagctgaggaaccacctctgaactcagtttcctcatctgcaaaatggtgtagaaatgagacctgctttgcaggggctgctgtagggattaatgagcgatgctggccacagcaagtgctcagtggcatcgcccacgatgacagctccgtgtgcagcacaggcggtgctggtgctgggtcctacaggggctctgcaggtgcaggaattccttgccaacccatatatttcaggagcactttttgttcaaagccctacttggtcaaccagccatggggcttttctccctggaaaacccctgaaccttccctgcagcttgctctgctgcctcctccaggctgcccccaccttcaggcagcccccagggtccacactccacttccagggtgttgtctgactctacctccagcccttcctcatgagcccaagtgctgtcggcctccatgtggccagcacttcagcgttcctctgttttatcattaatgtggccagtctgcctgggtggatggtgtcattttcccattttgcggggagaaaaactgaggccaggaaaaccaaaatcactcagggtagatctgaatccagtgtggatccatcactagaagggtctctccctcagaaagtccagcccaatgggctgaggaggtcgggggctaagccagctgggattcaggggtccctttcctgggagatggtgtagtggataacagacccttgtcccaggggagagagactgcagcctgaatgaagggagaggcggcaacgatgccccaaatattgcaggcacatgtacacgactgctgtcctgccctctccagttggtgccatggctctgtggccgttgctaggcatctgtgaggcccaggtgggccctacctgtcgtggagtggctgtgcagtgtggggtaggcctgggcccaggcaggagcaaggccgcctccgcctgcccaccctcctctcacttggcagcagcaagcagaagccattagcgcctggcagtccgtgtcccacggctctgacaaacgccttaaatgttgtcaccacggctccagctgtcccactggccgcctttactcctcgtaataaccaagtgtcgaggctgattgcagcagcaggatgcagccagtattcagagcagctcttaccctgggcatttccacctggcagccaggctgtgccctccctgcccaccacctccagccctttgtctgcctgtcacctctgcctgggccctcagcatcatccccgggccaaccagtgcttggctttgtgtcccaaagctggtgggcagcgacaaggtggagcctcaggcgtccacatccagcagagtgacagcctagctggaagagtctggctcctgctcccactcttctggatgacctgtgcagggagccctggctttgtcttggcctaggttcatatcccgccttgctgcccagggacacagggagttgtcagagcccatccctggcatggacaaagctggattcagtttgagctctgccatttgatcattgtgtggtcttgggtgggtgagtcaccctctctgagccttggtgacctcgtcgggggaatgggaataatgattgggcttcttggggctttttggaagcatgtgtgtgaagcaaggtgcagataatgaaatgaggtcctgtggaagaggctgggccatgttcataagcacaaacacctaccgcaccaatccctgagtccagggaggcccaggagaatcgaaggcctaaatcagctcccctggcctccactgccctccttcctacccccacatctttgccctctgggcattacttcccttatccccttcatctgaccttgcccttcaagttttgcctggtgctccctttcccaaagcccacctggcttagcctaaccatactcctctcccatagggtttatgtgccctttgagacagccttggatgctcactgttctcctctcatgtctgccttcatcctcacagtcttatgaggctgggactagtagaagccccgtgttagggaggaggttatcaggattcagagaatggtatcagttctgtgcattacacatgcagctcctggctctgccccatggggtactgtggctgctggtcactgtctgcccagtcccaggtcctactagaaccaggagagtaagctaagccccagtctcttcaggggccctggtagagtggacaagcacccattccaccccctggccttgagggctttcctcctgaagccctcatgatcgccaggaacagggtcagagcaggggtcagagcccacgagtggcaggcctaggaagtctaatttggccagcaccatggttccatctgagcatgtgatgcaaaagccacaaacaggccttaaacaggagagagatctggccctgacctgtgatgcctcagtacaggtccaggctctgtccctaatggtacagtggcctgacagtccttccaggcctcagctccccctttgtataggggggccagtgggcccctgacctcgttgtcttcaccttgaagggatgatcatcaaggcagaccctgcctgtggtgtgtttagtaagagtgcccagggccagttctccatgtccaaggtcacagatacctagatcaagcacctaggtcaaggtacctagatacaagcaccaatatccaggttgattatgagctctctggtcactgagtcatttgtttacaggttccccaaccctctgatgatgctggagggtgatggacagagaaaggtgaagaatgagttgtctctgtctcttcatcagactcttctcagggatacagaggtgatggtgcaggtagcagtgagcacagtggtagtggtgattaccaggagacatgagcactagcagaggtgaccacagtggggtgatggtcgtagtggtgacagtgatggtaaaggtggtgatggaagtgatgttggcagtagagttgatggtggtagatgaagatggtgatgatggaagtgatgactatggtgatggggatgaaggtagtgatggtggagctgatggtgatgggagtaacactatgatgatggagtaatattggcaatggtgatggggaggatgttggcagtgaacatggggacattggtgctggttaagtggggggaacaacagtgatgatggggatgatggtgaatggagtagcattctggtggtgcagggataatattgatggtgggtgatgggggtgatagggctgatggggggctccctgtggagtgtacctctgaggggcagtcctccaggcagccctgtcccactcgtgggctttgcccttgctggaggcaggacacagtggggcttgcttggtgctttttttcttttaacctccagtgagcacagccttctgggtaatgagatgcaaattgacagaaaagacaatgagccagcctgcggccagtggggcagcttttagagtcaggctgattgcctctgtgccaatttgcatggcattagctgtgcatgtcttctccaatgggttcgtgtatttcattagcggtcacctggatggctgcatctgacaaagggcaatgacctgtgatcccagaccagggggcaggggcagagccactctgactctgacctgaatagggctccaggatgtggctacaagaagtctgaatctgtggggaagggcaatggatagggggtagagattggagagttctcatgatcgccaggaacagggtcagagcaggggtcagagtgcatgagtggcaggcctaggaagtctggtttggctagcaccatggttccatctgagcatgtgatgcaaaagctacaaacaggccttaaacaggagagagatctggccctggcctgggatgcctcagtacaggtccaagctctgtccctaatggtacagtggcctgacagtccctccaggcctcagttccccctttgtatgggggggccagtgggcccctgaccttgttgtcttcaccttgaagggatgattgtcaaggcaggccctgcctgtggtgtgtttagtaagagtgcccagggccagttctccaggtccaaggtcacatatttcagcccactgagcagacctaccgtttctgtcactgtcaccattactcaaggttatgcctgggatcattccttgagtgccaccgaggaatgagggggcctgggcaagataacacccaggtggttgcccaaacccagccctgacgctcctccctacctctgtccatggtgctgaaagtcttcgcccaagctgcttgctctggtgttcctgctgcctaggtgggctgggctcgcccccacccccctccccaccacggcccttgctctctgaccctgcaacctgtttgacccagtgcaacccacgactccattccacgtcccttccccaaaacaggcaacaatggggctagaggttcttctccactaccctccacccccagcccaaccagtgccccatcgggcacatttcagggcccttttgtccccacctccctcttcactgtcccactccttctcctgaggttgggcctaatcaaagctaatcagaaaattatgagctgtctgattactgattagattcctaatgttaatagagctgagaagggcccgcttaggctgtgttttaggaaaaagtataaaaataacatcatgggaagggagcctggaggttgggctgggactcaggctctcttgttctagctggggtggggtctcactctcagctttcaggtgggaatacattcccatgcaggggagcttcctagcaccctaaattcttccagtgacggtgccattccaggcagctcttcctgtagaggcctctagcaagttctctgctcagggcagtgggactgaattgcagtgggaagaagttaggtggactataaagaagaacttactgctggcaccccacgtaagagcagggctatgtctgtaatgctcactgacctcctcaggccagtttactgcacacagtaggtgctcagtaaacatgtgttgacaggaaggaaggagagtcatatcaacctcttcccatgggaactgtcaccctcccatgtcctgcccctgagccatggtgggcatagaggcatctgagaaggcttcttggaggaggatgttggggcatgtcaggagaatgcactgatctggcaccagggcaggggtgctgagctccctggggactcagctcctggctgacctggccagatgaggcactcctgtccaccaccctctgcctctcattccagcagagccccggggacttctgctaataaccatgttattactgacctggcagcagctgggtggggctaatgggtaacattttcacaaggtccagagtggagttgtggtcctggagagcagacttcagcagttcagaccccagaggctgcccctcgcatgcctcttcgtggagaacacagtgaggcctgtacttagattcagcctcaccccactcacaccttcaccccccacaccatcttggatccctattctctgtcatcagtaccatttctgaccgggtttctgccatctctatcccaatgaaacccagggcctccaaaccagcagatccccaagggcaactcctgatccaccccctgaccccttgactgtgatgggagcctgaggtcacttagcatttcctcactgagctggcttgcccagcactggggccacacagatccatgaatcaagtccctgccttcaagggaccacatctgggagggaatcaggcacatgcagtgatggaaaccccagggcaattgtgggaacccagccctacagggcaccaggattcctggaggaggcagaagagcagtggctcctacaggatgaggaggagctagccaggggaggggatgagaaaggacactccaggcttgggatacagcacaaacaaggctttggaaccgcagcatggcaggaaggcaaacttcaatgtcagtgtggtagaagagagatgaggttggcagagcctggtaaaggataatgttaggaagggaggagtggtccaggcatccgggaaacacagacaggtcacagaacttgatggggaaacctgaaggtgtgggggctggggcagatgagttcatgataaccagctttggttgggagtctgaaggtgggttgcagggcttgggagaggtctggtcaggaaggcaaggaaggggtcatgggagtagggctggaagccaagcagggctgcaggggggtaatgaacaagatctccagcgaagttggtgctgaggagaagggcagcccgttggcataaactgaagaagaaaacaggtcaggccaagtttagaaggccctagagagaagctgagtttgggggagggggaaccagtcaggaggcccctggagtgaggtaagggaaggagcaacccagaacctggagttgtgtctccagtttccaaagtgagtccccatcccgttcgctgtctatgccctgctctccatccacatcctcacagccctgggaggggccctggcagtgttttggtccctccctgttatagatgagagatcaaggtacagagaggtgagggcagtgctccccaaattatgtgctgggtcaattgccaagccctaggaacttgggtaccttggcctctgtggctggacaagggaggagggcactgtcacactcaacgaccacccccgtgcccacacatatctctagaatggggactgatgaggggacaggagggagcaccatgccccacagagcactcagataaggatgtgtccctgctcccctagccagagtggccgacggcccctggatgggtaccctcacccaatgctatctgcatggttttttctaaggatgagagaaatgttgatgaattatggatcataatttagggggagggaaactgacacaaaactggcagaattctgataaattccacctgggttgccagggactgactgacctgcagaaatgggtaagtttcatgctggggtgccagctaggttggtggattcccacccgtttgagcccctgtgggatggggctgagcagggcaatatcttggaaagagccccagcagcctggagtagccttcagctctgggttccttgagggtgaggtgccttcatatggctgggctctgaagccacagttcaaatgtggacctgaagcagtttgttgcatgtattggtttatttctcattggggcatctcttgcaagtgctcaacaggagacctgggagctcagcaggggactgggtaaggcagagacctgcagccctgagaccagacctttcctgcagcacgtggttgtccaggtccacccacacgtcctcctgagtcagcctgctgctgcagagtaaaaatctctagagggtgggtttcactcccatttccagaaaactggtctgtaaattcaagctggtttctgcaaatgctcagcccagccacagaggccccttgcctcaccctctccctgttcacactggacacatttggctcctgtcccaggacacacccgacctctttctgtattgattgtggttccagtttaaagcaaaaaagcaatgaaagccagtggaatacttgttaccacctgtgagtgccacttcctttacttccttgggaagggatcccagagctcatggccttcctcctcttgatgttaaaacgtccactttggccggatgcagtggctcacaactgtaatcccagcactttgggaggccaaggcaggcggatgacttgaggtcaggagttcaagaccagcctgggcaacatggtgaaaccctgttgccacatggtgaaactaaaaatacaaaaattatccaagcgtggtggtgggcgcctgtagctactcgggaggctgaggcaggagaatcgcctgaacccaggaggcagaggttgcattgagctcagatcgcaccactgcactccagcctgggcaacagagcaagactccatctcaaaaaaaacaaaactgaaaataaaaataaaacgttcactttttggtaacataacagtaataagagagagtgggagtttttttaagtgtcctctcttggcaaaatacaacatagcaaggatccttgggagcccaggatgttctgggaaattctgtctgacctgaaattccagcatctgggataccaggctccccaccctggctggtcacagtcattccctctgcttctccatcacaggccacccctcatttcttcatatttttcctaggaaattgaagcacagcctgccccttccaggctggactgagggggtgcaggcactgattaccaagcctgtgacacccacagggaggtgtcaagcctgggcttgggtggagtggcggctgccctgctgcagagggagaccacaactcgaatgagtttttccctgttacatggattctgaccttttttaaattaaaaaaaaaatccattttactaattttttttatcaatttgcagaagacgcatgagtcctgtgagggaaaaggtcagggagcctgttgctgccaacagcggtgatggcctcccatgccagccttcccctgaggcaccctctgtgccagaaatgtttattttccttgcaggcttctgtttgctggaattgtggtctggggtttcagtgttttttgttactctggtggtcattttatctttaaggtgtaaacatggttaatacaaaaagagtaggtttgaaccttacgatgtgccatgggccaggcgcggtggctcacgcctgtaatcccagcactttgggaggccgaggcaggaggatcacttgaggtcaagagttcaagaccagcctgggcaacatagagagaccttgtcttataataattagttaataaaaactataacaaatttgttaaggaaaaaataaagatgagacaggagccaagtgtgtccagcgtagatgcgccaaggggcgaaggaaggggccttgagggacgggtaaggctgggtgcccgtcctgtcccaggaggcatgcatgtcaacagtgcacccgacaggaaagcacagccactggcgtgtctccatcaccctcagcacgtaagtcacggaccctgctcggccctcactgcccatcctgctgcatttctcttcatccctcagaacccagcaaaatgtggggtcggggcaagacatgccctcagaaggttgtagtgagtgagactgtgtccataaagctctgagcacatcatgtgagggccacaaagtcgctgaggtggccgtcatgcatgtagcaggcactgtctgtccacacaaagcctccctcagaccacgagtggtgccaggacagggctgaggggattcttttggtccctgactgtggacgcacctgcttggagcaggaggtggatggacagacaaatgtctgctcaaggccgaagcagcagcagcagaggcccacagggccagggccccctaaccccacctgcacttctgcccctactgtcagccctggggctccagctcccccctggcagagctgcatcttgcttcattattatgcagatattttaattatgcagatatgtttttagacagttttaaatatgtatattatttactcattagaccataacagctctggaaattggaaatctgtatttagtatctatctgtgcacaatacacagctaatgcaggacccacaagttgggagggaagacgggtggcaatggggccagtgctgggctaggcaggggctgctgggcatcctggtacttgtcccctcccgtggcctggatccagtgataccaaggcttgtgggggcaactcggagggacagctgggaggccagttactgatcctctctcctaggagaagggcaaagggaccactctaaggggtggcaggagggacctgagtccaaccagccaggccccacctggccagggatggtcctttcctggaacagtcactgtccaatactgctgggctttaccaccaggcgaacctgggtttgatgccccctcttcctacctaggggtctggggcagctacactaatgctttgagcctcaatcccctcggctgtgaaaggaggggagcaggagaatctacttctcgtgagtcttgctggggaggcagcagtgaagccctcacccagggtaggcactggaccacacctggtgatatcctgtcattgctaccttccttgcagccctcggcaacattctcagggcatactacccccagcctccaccccagagcccacgctccatcacagcttctgcctggctcagccctcagtgccctagatctcaacatcctgcaccccatgggttcagagccttttcttctaagcctctcatgtcctctgggaagtgggagtaaacataactaattaagaccaaagaactcttccagcctttccctctgggctgtgcagaaaaagtcctgtttgatgggcagttgctcctcagacccttctgggccaccagcactgggcagggagggactcccaggtgagggctggtgaggagaggaggccaaggagaagtgtggagcacctagcctgggggtggggaggagcaggccatctaagaaggtgggggcacccaagagccccagccccccatcacccaaggccctcccctcctggcatgcagggggccttcctatcccaggtgttggcctctgaggggtgcccatcctggccccaggtccctgatctcaggttcttgcctgcctcagctcccactgcaattgaaagctgtttaacatagtgagatttgcaggtatctgtgcagggctgctcccaggggagtattgtccccagcccagtgcacgacgagtcctcctctttcttgcattttcctgtaagaatggttcccagagctgagggaaattgattgttaagtgaaactctctgataattgcctctgaaatgcctgctgttatcatgatggacttgggtgtgagcatccccactcagcagtcccactgaggttccctccaataccctggccatgatggggacgtcacgggccaggcaaggcaccatcagtgacttcatagccgcatcgccatgggcagcccttaccccccaggatgtgctgaagaaaatagactctgagaggttaaaccacacacccaggatcacacaactggctgggcagagccaggccagactcaagcccaggcctctacacaggtccagagacacccagttttcatttagcagacattcactgtgcatctactgtatgcccagggccaggttaccataaacttgacagccacaagacacttacccaccaaacccagtgctcaaggggaaagcagacatggaagagggttcgctgagtgtcagggtcaggaagtggatgtggctagaggagtctgggcaggagtggcctgggagggagcagcatgtgcagggcctggtagcagggcgaccagagactgcaggcacctccaggagcagagcccagagcccaagcaaggaaccactcccagggggacaggcacttggggtcagggctaggaatggagtgcatctccccaagacaggcaggcactccagagacaggcaccctgtccctgccctgcgtggtatcccaataggttcttccctcgcctctgggcctcagtttcttgccccttccagcctgtccccaaaccatcaagaggaccagggagaggtagaagggaagtgctaggagggatgaacctccaggggtggggcagggtgggcacggtctccctgccagccctcagcaggcctgactattgtcagctctatggggacaggagcccaaggtctgggtgctcagcctgggccaggtaggtggggctaagcttggagatccctgcctcaggacatgtcctccttggcggaggggagtaaagcccaccttgtccagagggctggttaaaggcaaaaggaagtttccaggggaggtaacacagtctgatagggctaaccaggcagaaagagcagatagcagcagggcccagagctgggcaagagccagtgagagaaacctcacgggactggctgcctatgtgcagctgctgagggttggaggaagggggctgccaagagcctagccaccctgagtgggtgcagttactatgtccagtttataggcaggatgttgaggaccagagtggtgaagaccctgctccaagaaagtcaagctttgaacccaggccaggactcgggggcttcaaggtccaggctctgatctctgctcagggcccctcatgcacaccagtggtggtcccagtcctctcatcctcaggcctgatgggaccttgtggccgaagcctgcccactccactgcaccccaccagctgccttagcccttcctcccccaccaccgggcctgcctgtttaacagtttccacacgtccagtgcccagggatggactgattgatctgtaacactgaaaaaataataatggcttgatcgttactgaggattaaaagtaatccttttgctgtggctattacgactccgttattcacgagtcagtgggctgacccagcctttgagcccatgggattccatgagctcaaggtggctaggagctggggcctccctccctgggtctcccttgccctgtctgctaggctctggagccagaggggcctgtagcccccatgttttggggcctgaaggtttcagggtcagagctgagccctaagagggtgaaggagctggaaccccccagccaggagtagaggcaggggcaggagttcctcagggtcatggcccagcctggagactcccactagtgtcagtgtggcgtctgcagccccatcgaccctgtggcttttctgcggcaagagaccgcctctgcttcctccactctgccccagtctcaaccctggggaaggacaggggcctcaacagagccccactctgaggaagatttggcatccctgggaaggtagtaggtcaccaggtaaggaaggaggggcacagtgatgacaaaggcttgactcacacactgcctcgtcaggctttacacagcctccgggccaagttactgagctcggcacctgctgtactgcaggtgctcgcctaacactggtgacaagcattgcgaaccgtacaagtcacacagtaatgccctctacacaaggtcactgcaggcttatgaattgggggcctcatccatccctgggtttggggtcggcgtgggcaggcatttgtggtttaggtcaagaggaggctccaggatggaaaaggaagaagaggagtcaggtgggccctacaggacctggagaaggttgtgccttttacatgcagagaagtggtaaccactgaagggttttgggacaggggacggtgtcatgaccagatctacatttggagaaaaggctccaggtgttgtgtggagaataggtgatgaggatgagaggatgcaggttccgggcaggacagagcctgagctgggggtgcacaggaggtggtgtgagggatgctggggtggaatggaggaggcagaggggccagggtgggtggcctgcctcagaggggcactctgagctcaggtgggtctgagggtcactccagggaagtgtccaggagctcaggagggccaggattggaggcaagacatgggaggcatcacggagtagagaggcctggggcccccaaaaccctaggagtgtgaggctgggctggggagagaggagggtgtgggtcccagccaagcaggccttgcagttaagggtggcaggggacagaggactgagcctacaaaggagagggaagcagaggccaggagggcccagctctgtggggtgagagggtttgaccccaagagacactttctccccctgctcccgggaccccagcctcatagcctcccccaccactcagtgttcttggcctgaggaggggtagccagcccaatggggctggagatggccctggacagcccctctaactatggggttgtgacactctgccccaggagagcagaggccacagctccataggaggccccaccttcctccctgccctgctagtccatgcttcagaggaggaaatgccggcctccatgacctgacttccacttcccctaatgggcagctgacaggctttagtaggacgtcccctctggggcccacatgccatatcaggcctggactcaaggatgggggtgaggtgtcctgaataccaagaggcgggaccttctgagtagggctgtaagcccggaggtgggacgtgcctgccccactgtgggacagggtggggtgggggtgagagaccagagccacccacctcactgagcatggtgggcccaacagaggctggtccttggatcttggtcatgggctgagcaagacaaatgcattggtgagggctgggctccggggcccagcctgagccggactcaccatgtgaccttgggcaggctgctggccgtctctgtgcctggccgtcctcatctgaggagggccacaatggctccatgccaggcacactgtgaatggtacaaggtgcacagcacatgagtcactggccaggggagggttcagtgtgcagtaggtggccagttgatagtgatggttgtcattatgattgacaggacatcactgctctcagctctgcagaaggcccccgaggccagactcagttccatccttgggagccccaaggtttcctgtagagaagggatccttagaaagtaccaaataagaacatctgggtgacccggacttaggcccagagggtggccgggccccagcgtcttctccagcaagccttccctgaggtcccgagcccccacagcactgcgcttcctgtccctcaacctctcctgccatggtggttctgcgaggttgtgcctgtgagctgcaagaggcaggaccaggcctgccacacctccaccagtcagcacagtctggcacccagcgtgcccagtggcagatgtgggatggacagacacacagctatgccctgagggacattctgctctcaggcacaggggctttgttggaagaggccactggaaccagccccaaagaacaggacaggctcttgtggacagagggcttgggagccctgtgggaaggggctcaggaagtctgggagagggcccatgggcctggatggacagggtgggctgtgggcccctcctgtggagctctggatagctggcagaagggcagggcaaggtgaagcactttgtaacttgcagctcagccttagctccagaggagcttcctcttggcactggggtgacacaagtgtgtcgggggtagagagtgacactagggcttggcctagtacagggagtcccatggagatgcccctggggtcactgcacaggcttcacctttcctgcatggacccagctgtggtcaaggaggtgcccacacagcaagctggggagtgtctggggcagagaatctctgagggtctcgtaggatgaggggaagggagtcaccagtccagcctggccccagggagtgctggggatggagaggctttggggtgggcatagggcaggctgccttcctccgcttctgacctccctgtgctctgtccctcagagactggctgatgctgcagagaacttccagaaagcacaccgctggcaggacaacatcaaggtaggaaccccagcaccctgcccagcacttagggcatgcccatccatgcgtggatttgaatgctggggggtgggagctgcccagacacatgagggacacagaggggtctgtggagtagagccagaagccggtgtccaacattcagcaattactccaggcgcctctcactgctgggcacacagtgagatatgagcccacattcactccagaggagctgtggagtcacccgtgagtgggaaggctgcttgaaagtagtgttccctgtgttccccagataaggtgttcagattcttggagagcccccgggtcagaggcctttggacttcaggacttgtcagaggctttaatacagtgacctgcaagagatgctgggaaatggggaccaaatgcccttccctgacttcccttccctgacttccctgaacagcaacctgtccaccctggaggccctcaggctgggctcaggggactgggctgccatggtcacagaagcctctccttccacctcagaaggagctcaggctcgctccttggagcagaggtgcaagaagctgagcgcagaggatctagtgtgtgagggagggaaggggagcctcacccatcccagcctaggcctgagttgccctcaccaattccttgctgtgtttgattttgcctggggctggataccggccctcgggccagcatcagacggaggcagggctcctcctggattcaaggaagccccagtgccaaggatgatggaacccttgagaaccagactagttggcagggctcctgtgtcctccacagctgctggggtgtctgggccatgcctcctagtactcttgtgctaaacacagggaggagcagggtgggggtggcagacctgactcactccagctctgggccaggcacatctgctctaggaagcagtggggttattgtccctatttgacaagaaaacagaagcacagagtggatagacctacccgaggttacctgttggtggcagagattcacagctggctgtcgggtgtcaggggctcatgcctatgctccaagccctaaatctgttcctcctccccagtccccatcccccaggccatgctgaggctgcctcaccttgcccacaccatggcactcttcctttacccctggcaggtgctgggtgctgccctcagggagttcacatgagattggaaatgaaagattattttctaaggtgaacaaatgaatgagctagttactccccaaaccagtcccccttccccaggagacaggactgacccttctctccctctctcctactccagtgctacttgctcacagtccctgtgggacccaggcaagggcttcagtttccccatttggcaaaggactgactggtgccagtgctgcctgtgagctcagctatggggtgtgaaggaatcactgcacacatcaggctatgtgggtgccaagccgctgatggcatgggtgcatatctggccacaccagcccttgggccctgagtacttctgtcctgagatgaggcagtaaagggctctggctgctcccctccccctggcttgacctgaggtgcccccagctgtgggtgtgaccacaggcagccctgaccacagggccacctgggcccggccttgttcatctgcctccctgccacatcccaccgggtgcctgccggcctgtcccactggtgtcccaggtagggtgggtggggctgtagtcacctccctccttcccagctgctgggtcactgttcttcccaggaagcactgctgctaccacagctgccaggctgaaaggcatcaatgctaatggtgtatccaagagcccaacaccagccagctatgctcgggctgccagggattgctggcagcagtggctgcaggagggactgtccatgccaggggagggtgcagggacttgaggctgggaagggatgctgttttgtcccttgcaggcacaccacccacccctgaaaccacatccttccaatgaccttcaggagatgacagacaaggagccatgttccctcccagaactcaggagaggcacctggcctgtgccacaattctagcctcaaactcaggccctcttcctaggaatgcccttatccacccctccttcagtgcaaagcctctctctccagatgtctgcccaggactcccttttctagccccaaccctaagatcggcccccacagcccacagcagtgacagcgtgaccagcagcagtcttcttacctctgagatggggaggatggcgcccagctgttctggccacagaggagatgcttggcccatgtggccagactggaatccactgcaccatcagccgggtgtggccctccctgtattgacagcacacagcaggtccagatgcaaacctctgaggaacagacaatggtatcaatggtataacccacatccacatgcccacaactccactgacctcagcctggggggttggggatcctggagtctgcagggtcagagctgggacaagagatcaagagggcaatgcctggatgtaaagctcctatcccccttcctcgtccctggccaacccagacccttggacaccagggaaacgatggccctgattagcaggcagtgcctcccatgcccccacaggtgggcagcaggtgccctggtgcccataacacttaggatagatgaagaggggccacctgccggaccacacttggtgccagcaccacactatgccaacactgtgtgccaccaaaaccaccaccagggaggagctgggccagggcgtgggaaggggatgggggagtggccattggccccagggcctcagtgccaacaccagggcctacaggaaacaaagccatgagctgggagtggaatggaagagacagccctcccctgggaagtgtaagggaaggacacagccctgccctggggaatgtgatggtgggagtggatggagctctgcctagggactagagggagggctgtgagggggctgggccaggctagaagagccagctggacaggacaggtggccttcctgacctgagggtctgacccagccatagggcccctgcctgcctctgccaagccagcgacagacggctctctcagaaaacagtcctcttggccaggctgagctggcactaggccagggcaggaaggccaagcgtcctcactggtgcagcgggtggctggcctaggcctgcacaggcagctggtgggcaggcggcagtcatgtctggccaggccttggcagccaccttccaagcactgaacttggatggcaactgtccttcccccgctcaccccgtgctcatttcctcagcttgttccctgagacccaccctcctcacacctctcttgggcttggctcctgctaaggagaatgtatgtcaccaacacaagggtcacgtggaccctcctgccccgcccctcgcctgttatctgtgtgcccaagtccacatgggagggcatgtgtgtgagctcagagtgggtgactcccccaactcctacccagttgggcaaaatggcccctaaaatatcagataacacagggtatgtcaggggagtggtccccagacattaaggacacccgtttcactccacccgggactcttccacactcagcctctcctctgggctgtggagttgcaaagacagaaggtggccactcatgggcagagttggccctacccctggggaggcccagctccctgttctcttcataccctcagaggaggcctcctcatcctgatattacgagtggggaagtagagacccagagatgaagcctcatggaggctgcatgatttaactgggcagccttgcctcctcgcgggtgacccctggaattcctcagcaggccactgggacaagccagtaggctgggtcctttttggctcagcctcagtcttcactcactgcccaggattccagagctcacgtgtccaggtcagaatttgaggccaggactctttgctgaggtcctgcactcagtcactagagaatactgcctccttgttgctcaacccaggaggtggtcactgctgatagacattcaggtactgtgttggcccaagcagacagaggccttctcagggaccctcccaccctgaccctgacagccccctcccgccacacccccagctccacaccacatcatgcatagcagtcacagctgtatttatgatatattttcacatgtatgaccttgtgtgccaccatccatgtacttcttaccaaggaaggggcatggtctcgccctcctagaggcaggagaggccgggagcggtcattcccacatgcatcaagccctggggggcagggagaccatacagaatcctgagcctcatctgtcatctgcaggggactaagaatcctcctgggtgacatgtccccccatgtccctgacgccaccaatatctgatgttccactaagactgtgaaacagcagaacaaatagagaagcagagcccctggagcagctggagaggtggccccagtgaacgctgaggtgcctagtgttgacccaggtgcaggcaggacccagccacagcctgtgaggggagcctagggctcctgagggctgcaagtgaccagcccccacctgtgtcctttcccatgcttgtggaaggtttgcctaaaaagtgggtgagtgaggccccaggttgtaatctgcagtcctcccaccgcacccgcccgctttcattacggagggaaagagcatcagagctgtgtttataacccccttttagataacaaatcacattttcttttcacagcaagtgtgttgaattgatattttttccccctcagtttaataggtttgtgtgttcaggaatgatcttcgtcaactgaaactccttattgtgtttgatgtaatgtcagctttcattatgcgcttcggtcggagccgggcgcagggaaaggccgagcaccctgcagcttgggcccggcctccgcccccgccccaggcccaccggggctgcagccttcttgcactggtgggtgggtggtgggtgtgggcaaggttgacaacaggctggaagggcaggttggagccagggtgcgaaggctttcttctccctgctctcgaaacgtctgaccgatggggtcataaggctgctgtaagaaagcgccagacacggcaggcgccctgggatgctggaactctcgggctgcctttggccttacattcctcaggaagttgtggtcttacccatgcgtggtgccaggcatgcagtcagtgttgcagaatgctgggactaagcctgcacatttggccagtggcctgcagcccctagacccctggtgagagacagactaggactgttcactgaaacagtcccaggtactgacggagcccgtgggcagtcaccacagccaggcccctttccagagtcctgcctgggggagcctggggctcagagagggagtggtctagccctggggtcacacactgagtgagccccagctgggccttgggaagcgggtgtccgggcgacatctgcgctggtggtgtgagtgctggctctgcctgccacttcacagccagcccctgggtggcagacttggtcaccactcccatctgcagacctcaaagaaacaagccctgagtgagtgaggggccactggggccacgctgcaggtttttgccgtacagaacagggctgaggagcacctggagagggtgacttggacagcagctctgtcctgagtcgtggccctgaagcccatgggggcagagtgtggcagaccctcctgagccaatggcacttggctgacaccgggctcaccttctggcggcctctgtcagccgcgctcggttctgattaaagatcattacacatgaaattagcccgtttgtgttacgggtccccggggcggccggtgattatgacgcacagatggccaagaacccaggcgactggcaagcagacatgggccagggacaggcggggcagacgcaggcgggtgagggctgggaggcaggcgccagggctgggctttgttttctcccactcctgttgtggaaaccccctcgcatttcacaacaaatcacagataattaataagtacatgcccgtaatgagcaggctttttaatagaagaaattggaagatgcggcgtcgagtcattatttccctcctgcccaaactcggctctgttctccgtcttcctcactccctggtgctgcctcagccagcctctctgcagacagaacctagaaggctgcagcccaggacacttggcccctgagttaggaaggcccagggaattctcagtcgaggggtactgcatgctcctggagcctgtgcagggcccctgaagataggcctggctgcattctcagccctgacctatccggcccttccaggaggggggctctgggtgggggaaagggacagtctctgccccagaggaatctaagggtgccatgcaggccttggggctaggagtcctgtctgtctcgggaccctgagcagctagtgctgaggcctctctcccctcaccaggaggaagacatcgtgtactatgacgccaaggctgacgctgagctggtgagcaccccctcctgagccacacctccttgctgggccttggtggccttggctgtaaaatggatgttaggactcagcgccacacattctgagctcaaccctgcagagccgtggtgacacaggccccaccttccacctcccacaactccctagaagtccggacccctccagggctgcatctctgtgcactagtgggctgagcttgactgcagtgtgaggcaggtggtgaggcgcttggcccttcccgcacggggcagtttaggtcccagatggagagagcctctctaagtgcagtgagaggagggagacagggagcagctgggaaggcttcctggaggtgggcaggtgtgagcaggatgcaggaacgtccaggtgcatttccaggtcaggccagctcccttccctgtgctgagcaccccacagcctggcccatcatcagaccctaaccctgagctcacctagggtcacccacctcagaagtggtggcactgggactgaccagagagcccaaagccacaccacccttctgcctccatgtcactcactggctcaagtccgcccgggctgccctctgaggtagtgaggtccccatcaccagaagactcgtgtgaaagctgtatgactatttgcaggggaggtggctgtagagaagacgagtgtctgagggtgtagggcacttggagtagacggtgtttgctgagcttgtcaaggcccaagaccctctgcctgactttaaggcaaaagtagttggacccaacagtcccctctgtaaacagaggtgtcacagcagcacagtgtctagactgctggctgattaagaggacccaagattcagtcttcctctcttaggcctgcgggcttggtgggtttcctggggcaagtgagaggtacccaatgacaccaggaggtgagaaggctggaaaggatccctgtgcaggatccacagtgccaggctggcctgggagagccgcaggagggcacagggcccgagacggagcggggtgggctcaagcaggtgtgcttccccttggctgagctccgtggctcccagagaagttgctaaaattaaagctggaatctgaaattcaaatgaagagcgaacctttaattagaccctgaatctaattccttacccccctcagcagcgggctgtaattttagcaatcagtgcattaaatataaaccaggagactgcagttgcccaccatacaaagcccctgggctgggggttggcactgaggggctccttggacagcctggtgcccaacccctactaggatgctctgaacctacctccagcagcctcaactgtatccagggccccaacccctcactctaaatcattgactccttgcccgtagccccttggacttctgttggggggctagagattgcccgaaaagagagcttttcactctggggcctggctagactagggtcagctaggccaaacgcctggtataaatgacagcacgcacacattttccaactcccctgcttgttgtgttgttttgtttttttaatctttgccagaggtacagttagatatctttctagaccatttacttttaaattaccagccagaaggtgggggtgggggaaagaaaaggaaggaagaagttcgccagctgatagcttatcagaacagaatccaaatgtcacattagttgagaaagttgggagattaaattttctagtgcccttcatctgccgctgacatttcgggggctttcttctcccgcgcctccccctcctctgagcggaacgtgagtggcgcacgcctcacagtcggccgcttccactctggcctccatgctccgaggctgcctgccctggctctacccagcacccgagggcttctagggtgtgccaggggtgggcagatgggtggcacactgcggaagggcagtgggaggacagcagacagcttggattctgctgtacaaaatccaccttcaaagagatgaaaagagtgtctgccacaggcccttcagagccgtacccctgtggtgtggagagcgcatctggctgggtggagaggcacggtcaccctttccccagacaagacacagcttggtcaaatgcctagaggcagaaacacaggggaggggcatgcccaggtcatagtgggcagcgggggtcagcccacgtggacccatgggggagaatgaatgagctaagcctgggctgagggtggtcacagaggctttgaggggcagtgagggagcgtatggggtgttcagctgcttatgatctctcctatcagcctaggaagcccccgagctttgctctccacccttagcctccttctttcccttgcctccccagtctggctttttcctcttcaccttcactctctaccaccatcttccctcccctcccccttgcacacctgcacccaagcctgcccccctcccatcggctgcagcatcaacactagtcacagacccactcctgccagcctgtgatggtgggcgggggcgcacggtgcatgcccagcctgcccggccgtgagatgccataattggcacctgtcaggctgctgtggctcattttagaaaatcaacaggggccctttcagtcctactgctaccaggcaccgcagaccctccctctggaggtcagcagatctgaatggtagcccccagcccagctctcccaggttagcctccccagctcagaccctagagccatccggctgcaggggatagtgccctgccttagatggggctagggccctctccctggtcccagaggaactccatgaaggggctgggcaggacccagtgatggctgtgggggccctgagctcctaggagggactgctgaggcctccctgtgattgcacaagcacatccttgtaagcagaattctggagcctgctccttctgattggctccatgatttgcctcctttcctaattggttttcaagaatgtggagaagaggttggtttcctttcggttttaaaatttgggtttagcaaatgtggggatgatgggtggggtgggcagggggagatgggagtcacaggccccttgggtgaggggtccaaccccgtgtccatctgtccctgagtctctccatctgtgtctcctactgcaatagtctctctttttgagatgcccctatctcctggactctggccctccctgcccctacttgcaggcctctacaacccaattcaccattttccagccctgacattgctcgggggtgccctttctgcaggacgaccctgagagtgaggatgtggaaagggggtctaaggccagcaccctaaggctggacttcatcgaggacccaaacttcaagaacaaggtcaactattcatacgcggctgtacagatccctacggacatctacaaaggctgtgagtgtgcagagcaatcgggacagcccatcccacctgctgtgggggcaggcccactgccagggcattccagagtccctggggacagaaggccagtgccatctacctccagcctcctacacctgagattactcctgcgcacctctcagattcacccacatgtgggcatcaagcacttacaggcagagcctcaccctaacactcagcaagttgcaaaacactgagcctctatccctgtgcatgcatggtctcctgcccacgtgtccacaggcacccacacaaatgcacgcacacagagaccgttccccacatgttggactgagtgcccgcctgcccctgaagcaactcctcaccacccttccccattccctgcccccaagtaggagtggttgacaagctgcaacacatcaggtggacacggagggtagggggacagggaaccacccctcacagataccaaccctatgacactaccctccttctcctgggcatagaaccaaggaggtagggagttttcctgcccagagcagccaggagctggggatgtaaggaagggggatgtggaagagggtggttgacagtccaagcttcagggacaaggcagctttacacaatggggaaacgaggtcactatagctagaaggatttgagtcagacatgaggaggaacttcctgaagctcctgggaggtaaaggaggaggaaaccaagagtcaaacactggatggggagctccagcagcaggattgaaggcactgaggcctgttgtttctgacacagttctatgggcacctacagagtagccttggaatccaaggagcccactgggctgggactcaaaagccccagagccactgcctcagctccataatgcagggaattcccagggtcctcagggaggccctctccatctcggggtcagctaggccctctgggcagcctcaggccagggtggggaaggatgctcccccctgctccccacaggctgcccgcaggccacctgcccgagccagtcgaggggcactatcacaggcaggcacactaattaaaacaggagccacaccgccctctccagtcacccctcgctacccacataaattgcattttatatgttttttatttactgtgtcacttttaattaaatctgtaatcacctgcctaagggggcatggtcccctttcccaactcagcatgatctgagagtatgtgcaggtgggtacgggtctgtgcgcatggggctgagtagcaggccctttccaggcgggcgcaggggtgtttgcgcgagtgtgccttgccgtgtatgggtaagcgcgtgtggggtcacaggtacctgcatggacagcccacgcagagcaggggtctcctcttggcccttgacctggaccagggacacccctctgctctaagcctgtcattatgcagatgggaaaaccgagacacagtgaggggtgggacctgccaggcagactctctcagggcaaacagtactgtgtgaaactctggagggcctggctttattttttccttagagagaaaaatagaaattgttcaactcactaagtttctaaattaggaacaggaccataacatactgttcaataagcagagccaatgcttgaaatgtgttttgttttcacattatggtcagttacgggaagccacaggaacagacagcgaagggagtgggagcagggggcagggatcaggcagcggacgcagcagaggctccacgctccagaggggccgcccgagggagagtgccccagagtgtgtcagtgccccagggccggagcagaggctagagaactgtaaatcatgctttctacctttgtctgcctgctgcaggtggtctctggtgctcacttgaggtagatttttgatggggatccctgtacggggtgacggtggctgggctccacatgggaagaaagagggtgggggtccctgaaggaggaaggaggcacagaggcctggcagaagcagctgtgtcccactcctgccgttttgtcctagtgtccagggacagggtcactgcacacatgagaacatgtgtcacacacacacatcaggccgccccgagttgggggtcgagggtactgctcaaaccatcctggatctctgcccaggttgaagggtccgcaggattggagtccattctctgagaggagccttgtttgtgtgtgtgtgtgtgtgtgtgtgtgtgtgtgtgtgtgtagggatagatctggacaggggatcacacacgtgcaactacaagggttggggggaagggagaatggggtaactgatggtagggggttgtgagcaggacccatgagtgtcccctgtaggtgcagagtggtgtgtaggcatgaacgtgtgtgcccttgtgcccatggtggcagctggggtgctaggcaggtgggttccatctggctggaaacacacaggttagacacaggtatacctgttggggggtgtgcagtgtgcgcatgcgtgtacaagtacacttgcctgtgttgaagcaggatctggcatgcccctgcccctccaagagcccccgcccccacccctgcttgcttctggccccagttgattaatcatggagctgagtggcttccagcttatcaggtaacttaatagctgaataattccagccccatcagcaggcccttaattgctttcttgtggctgaagcctggagtgcatgctgaatgggtgagctcctgggggaccagtgctagctccaggcagcatgctggactgagggctccgagttcccagcacccagccacctgggcagcccctctccagaggctaccagccacagctgccctgcctgctcatgtgggacctggaggaagagtaggctgaactgttcctttcacagcttgggaggggtgaggatcagaaagtcttcctggaggagctggggcagccccagctgggccctaggaaatagggagggcctggataggccgagaacagttgggggattctaaatgggggcacaggcatgagtgtcgtggtggtgggttcgacaggacacagcccaggtgctccccaccccagctccccgcttccccccagccactgtcatcctcaatgagctcaactggacagaggccctggagaatgtgttcatggaaaaccgcagacaagaccccacactgctgtggcaggtcttcggcagcgccacaggagtcactcgctactacccgggtaggtaccagcccctgtcccctgtctacccagcacctcgcctttctccatctaccagcccacccatcctgggggcatggggcggggtggcttctctgtagtctgtggcagcccagtcgcctctgcaaggtctgcctacccaggccagccctttcctgccagtccccctcaccttctctcctccctcagccaccccgtggcgagcccccaagaagatcgacctgtacgatgtccgaaggagaccctggtgagcgagcaagaaggggctggggagggacaccccctcagttccccacctttcctgcctgctcccctccctccccatttccaagcctcctagcagggcgcagccagctgtatccaattttcatttcacacatggttgccactggaaaatggatcccatcacccaggcaggcctcccagctgccatgccccccgtccactgcccagcacccccacccactcaggactgagagattggaagggagattggaccagaaggggtccccaaaggcagatgtagcctctgtagggttggccagtccctgccccacccgtctgagccccagatatccctcccctctgttctgcccctccggcagctccctgtgactctccttccctgccacctgcaccatcccatacacagctagactgtgccctcggggccccaacctgaggcagaggacacaacaagccactgaagccagggaatgtggctcctgccccctctggggatcacctgctcatataccccctggtactttttccttgctgaggaaccagaccattcatgtcatgggcaaggactgtgtctgtttcgttaaatgtggtatcatcggtgcatagaaccctgcctggcccacacagtgcatgctcaagagaaatgtattgaatcaatatgtatgtgaaggaaggaaggacccacaaggtcccagtgggccttaccctaacagaggcatctcctgggcaggtatatccagggggcctcgtcacccaaagacatggtcatcatcgtggatgtgtgagtgagcagtgctggcaagtggggctggggcagggacgggcaatgggctagactctgctgccctgaacatcttgggggatgggcaggagaacacgtgaggttcccctggctcctccacgtcccctgcctgacctctccaggagtggcagtgtgagcggcctgaccctgaagctgatgaagacatctgtctgcgagatgctggacacgctgtctgatgatgactatgtgaatgtggcctcggtgagtgccaaggtggcagacggggtgaaatgggtcaccccatctgccctgctcctgtgaccatcaccagccccatgcaatagctgcctaccccggccagcctgaggccactcaccaccctactgttcctgcagttcaacgagaaggcacagcctgtgtcatgcttcacacacctggtgcaggccaatgtgcgcaacaagaaggtgttcaaggaagctgtgcagggcatggtggccaagggcaccacaggctacaaggccggctttgagtatgcctttgaccagctgcagaacgtgagccccatgggtgggcaagtgggcggctgggggagtagagggccctggcttggtgtacccaggaaatcaagacggatggcctcgttagcaccaaacaggcagcttggacagatagctccatctgctgtgggggaggagggccagaggtccaggcccactgcgggagggaggccctgcccctggaccagggagggctgagagctgcctgcctccgcctcactcccctcagtccaacatcactcgggccaactgcaacaagatgatcatgatgttcacggatggtggtgaggaccgcgtgcaggacgtctttgagaagtacaattggccaaaccggacggtgaggctcaaccgaggcaggggctaccctgacctgggcccagtacagaagagggctgtcccctggtggccacagcagtaacctcaaaccccccacaggtgcgcgtgtttactttctccgtggggcagcataactatgacgtcacaccgctgcagtggatggcctgtgccaacaaaggtacctcccctgcgcatcactgtcaggggcctgcctgccatttctttttgtcgattgcgtatgttcaactggccatccatatgtccagctgtgtgttcacccgctgcaagacagtgtgcctcctcccatccacgaggctgtccctcactctatctgggggctaacgggtccacctaactgagcctctttttgcccgtctgtctgtccattgtccaaccgtcccccagcttgtctactcctgcgtctgtttgctgatccgtccatctctctgtgcacttgggcctggctgccgggtggactttgaatggcattgcaccctaaaatgagggacctcagacctcaggctcctccctccccatctctgccccctgctctgcttcctgatactgctgcactcactccctctccatagcaccgcccttggcagggcagaggccgggagcactagagggagaggaccccaaaaagagaggagcccaagaggcgaggcagggctgcagacacaccccaggggcagggccctctgcacatggatcctgcagtgccagccaggcccacctctgcctctccttccttcacaggctactattttgagatcccttccatcggagccatccgcatcaacacacaggtgagacttggggaggcccctcctcccagcccctggcttccctgcagggacgctgtgtgccatgggctgctgtgggccaagggcgccccctcacagtggctggggcacaatcccaatgcctggcgagacagaacaggcagtgcctgggaaaggcactcattacccccaccactgccccctccccaggaatatctagatgtgttgggcaggcccatggtgctggcaggcaaggaggccaagcaggtgcagtggaccaacgtgtatgaggatgcactggtaaggcctctggacaaggaaggggtggggctggcacccttcccccggagatgtgcccacagggtcaagaccctggagggcccccttatggggtaaaccaagcacaggagaaagaggtggcctgcacctcagtccctgctctgaacactcagggtggggtcagtgctggccacaggtgactccatcatcttcctctcccttcagggactggggttggtggtaacagggaccctccctgttttcaacctgacacaggatggccctggggaaaagaaggtgaggaaaggggagggttggggctatgggtgtgcctggggaggaatgggcatgcccacagcaggtctgagggtggaagaggggcagggcaggcctgcacactgcctgtgagagcagcttgaggccttgtggagggtggttccccatggaattgagctcactgaggagccccccatgcttctgctcccagaaccagctgatcctgggcgtgatgggcattgacgtggctctgaatgacatcaagaggctgacccccaactacacggtgagcatccccctgcccatccgcgtaccctgcctcccatgtggacacaggcaggctcagcagagaagactgatgggtattacagcgcctccatggagacctctgagttcaggggtcggggaaggcttccccaggaggtgaccttgggtctagaacaaggtgaccttgggttggcaaactttctgtaaagggccagactgaatattttaggctttgcagacctacatacccatctcttactcggttgcactgttgtattgtgaaagcagccacaaacaaaacataaacaatgggcatggctatgttccaatttaattttatttgtggatactgatatttgaatttcagataattttcacatgtcacaaaatagaattcttcctttgatgttttttccagccatttaaaaacataaaaccattcttagctcatggccacatagtaatgggcagcaggccagacctggcccatgcacataggcaggagtgtcccaggcagaaaggaaaggaggggatggcgtacattggaggcagagggaattctctggccaagggcccaaaggtgaaaaacaatcataaaccagggtaggggcaagatggcattgtggctggcccagcgcctgcggtcagggagtctgcatcttggcctgtggaagggggagaggtgtggtatgtacaacagcatcattaagcctgagcccccctgaagcctctgcttggccctgagtgggcaggggctgtggcagttggcctccaggtacagtaagaaactgactgggggaggtaagggctaggtccaggtcccacttactcctacttcccttccacctggaagggaagccccaggtaggattccgaagggtccactcgtcccgctgctctctcttgacgtggggacaaggaggaggcacaaatcaggggcagtagtggctagaggagggccacaggggtacagaagcagcagacctgtggggccggtggtggcagagaggtcaggacaactgacagctcatgagaaccagggggagaggatgaggactgcagagcagcagcccacacgccggttagccttggcaagggctggtgcacaaggggcaacccgcctgcgggcctggctggagagacaggcttagggccacgtggcatgggggggcccttagcccaaggcaggcaaacagaatctctcggtgcggtgggaggccaaatagggaagaactccggagcccagggaaccccagcccatccctccagaccctgagcccccaatctgtgcctccagcttggagccaacggctatgtgtttgccattgacctgaacggctacgtgttgctgcaccccaatctcaagccccaggtgagccagacgggtggcctggagggtgggcaaaccttccacaatggggacttctgacttcccaccctgcctccaacagaccaccaacttccgggagcctgtgactctggacttcctggatgcggagctagaggatgagaacaaggaagaggtaaggagaggaggagaacaggggtgggggacagagcagaggagtgtaggggccctgcccctcacatctctggcccttccagatccgtcggagcatgattgatggcaacaagggccacaagcagatcagaacgttggtcaagtccctggatgaggtaaggaggcagggctgggggccagggagtcagggtgggcacccttctaccccagcgccccctgcctgctagcccaagtacctgacccagcctcctctcccagaggtacatagatgaggtgacacggaactacacctgggtgcctataaggagcactaactacaggtaagtgaggccagggctgggcgggcagagagggtggggtggccccagaatctgagcccagctgtcccctccctctcccactgtgaccaccatcccagtggggcaccagtggccagggctgctcactactcaccctgagatgcttagtctgccaagagactccctggcttttaaggaacaagcagcaggtctgagagcacagcacagtcatccaaagtctcctcatcccaggatactgcccttggcatgctgtcagcctgcctcacagtctcagggcagaggaggtcccttgtgtgtcaggctgggtcagtgcaggctgacctctgcctgccccacacagctagtccatcctgaaatgccggggcatcctcacagcccatgccagcccacaactgccaccccctgcccccaccatatctgcgccagccctgctttctgctggctttgagtatctgggggctggtgaccccactcccacggcaacactggcattgcagccagctcacggcagcgtctgccccttgtgggtcagagggaggttggctgggcagggggctgttgtgagaggctgctgggaggggagatggtgtggggatttgctttggggctggttgcccggtggcccccaggagagtttgagaagtggagagcctccagggtgccggcccctagaccatgaacctcctgcagctaagcggggagaggggtccctggtggtgggaggaggggatgctgcagctggggcctctgcccagctccaaggccatggggagggggtgccagtgtggcccgcctccccccagccgtgacccgagcttctcccccctcagcctggggctggtgctcccaccctacagcaccttctacctccaagccaatctcagtgaccagatcctgcaggtcaagtgtaagtggcccggcccctgcctgcgccctgcaccctgcctctgccccgcaccctggccggccccaggcagcatagccagcgccgcttgccggcgaggcagtccctcctgcccagtctgcccaccctcaggtgcccgcaggctggggcacctcgaaagtctgtggaaatctgcatgcttgccttttctcagattcggttccagaccattctttcatggtttctgttgaggttgctgtttttggtttctcctactccgtgtcttccctccttagcctgcctgccccacacactcctgggggctgcattcttggaagacaccccctccccttaccttccccctcccctccccacccacctccactccccttcccctcccctccccttccccctcctcctccccctaccctcccctttctcctccccctcctcctgtccctctcctctcccctttcccctccccttccctttccccttttccttccccctccccttccccccaccctcaccatcccccctcccctcaccttcccccctcccctttcctccctccacctcctctcccttcccttcacctattccccctcccttcaattccttcctccttccccttacctcctccccaatcccacctcccctctcctcctccccctcccctcctccctctcccttcctccccttctcctccccctctttcccctcccctcctctccctccagtccttcccctcccctcctcccccctcccctccccccttttcccttcccctcccctctttctccctcccctcccctctttcctctctcttcctgttcagctctctacccctgtggtgcccccttcccatggtgcctctctctctctctgccccctcctctccattctttcctcatccatcctcactcagttcccacttaccctctcatccttctcctctcacttcctacctctctcccctctgcatccaacctccctcccttacgcactgtcctctcttcttccctctctccctcctcttctccctgcatctcctctatctccctctttctcctgctcacctcctccatctctctctctcactctccctccctcccgctctccccaccccagcaccccccccccttcagtcccactccccacactccctccgctctgccccctggctccctcctcaccttctttcttccctccttcattccccatccccctcctccctccccctccctgctttctccctggcccccctccttcctcccctgcctctcccactcctctgcctgtggctcacccctgcatgccctgctcatcctgggcctctcctgagagagtctctagagcctgtggccctgcctgcccaccacgcccgaggtcactgggagggaggctggggctccggccccaccgggcgccccccacctgcctggccgactgggggctcatctcctttgagttttcttgctctctctttctctctcatgtcgttttttgcaagaagtttcctttcggtatgatgatgagacacaatattttcattcaaacagccattgaataaaatattgtttgtgcccctcccctttccctcccccttttcgtttgtttttgtgtttgtgttgtttttgttttcctcgctttctctcttggtggactgtcccagtgccaatcagcaaactgaagggcaagtatattcagaaccagtgcaccctcctcttcccacccctcccatcctcacgcccctgcttgcccccctccctgcccaggaccagccaaacccctgctctccagggccccctcccagcttccccttggctcctctagttcttgcctttcctctgattcctaagcccctatgagagccagtggcctgtgcccctggccctgcctgcagggtgttctccggcgtgttctcagggcccacaaccctttccttggacccctcactctctctggggaggcccctgcctcccccaccttctctgtccctctaagacaactcaacagtagggacagtctggacgcttctccaccacctcccactcagcagggctggaggcctgagatgcagggggtagatcagcccctagtggggctcatgtgaagctgtgggaaggggccagcccacaaggcctactctgaggtagctctccctcctctgatctctggcagtagcttcagaagctggcagccctccaagaagggaggcagaaggctcagaagcctcacgccctgatgctggggccaaagggcagcatagggcaggccccagccattgaagagcagggctgacccgcgcctcctgggcactgacacaggtgctgatgtccccgtgtcctgccggcccgctgcttccagaggctttgctgagccccggggtggcttggcagtatggaaaaggtgtttccctggggaaataaaaccagatttggggaccaggggcctggacagggatggaatgggatctgtttagaccccaagagccagcaaaggtgtttggaggaaatcaggctgggtatgaaaggaagggttctggcacactggggtgcctaagccaaggagacttctggaagagtgggtagtgaacccctagaccctggcagagagtaaggggagtgagagaggacagcattacaaaggtctcagagagccacctctcccagggaatccctgggcagatggggcatggagagccacaagaggatgtccccatgacctggaagcaggggcacccaagaagccctaggggccctgtccagcctagtccagcaaaggggataaagggatcagagccacctccagtggccagggcgggggtgggggatgtgccctactcccactggcttgagttgtctttttctccccacccccgcacatcccacccagtgaccccagaaatgcagggccctagtaacaatgacaacatagcatagtctccttccctgctccttcgccctcctttttctttttcctccttctcctcttccccccaaccccttccccatcggcttgtgtccaaaccctgcctcacagtcctatcagaaaggaacagtccaaccagtgactgcccagcccctccaagcaccccaagtgcccccttccccagaatcttgcagtgcattgtgggagtatttggtatcagggacaatctgtcttctatacaattaaagccctgggagcaaaagagagctcagaagtggagacaggctaagaaggtggaccacccacagtgagacaggccaagagcagagggacccctcccaggtgcagaccagcaaggtggccagtccagctgggcagggagaggccacagaggagccccagcggccacatcctcaggttcactctcaaacccatacagagatactcacacttaggcacacacacacacacacacacacatgcatgctcactcacccacacatgcacagctcataagcccagggcacaggcccaactggggatgcctcaacagcagccctatgccctctctggagccctagcatcccccatggctgcctggagcccagacaggttttaggaagggtggagacccagcccgtctccacgcccttagccaagggaagcaggtacagtttccagcagcacccctgtcctccttccagctcctcagactttcttcccacactgtgggaacactccttggcactttgagggtctcccttcacctcctagcccagggaggaccaccagccccgacaatgcactgcagtgaaccctcagctgccccgacccgtctctggttggactgtttgtgcccgtgagaaaccccctcggtttggccatgttgatgcctgacacagaacaaaagcaagacctaccaaaacgcaaacagctgcggcaaagaaagagagagaaaaatccgcagccaaaagccaattcccttcctcaaagtctctttggaggcaaaggaagctcagcatgcggttttttccattatggatgtgataagagcgagactggcgcctcccccagaccatgcatatatatagcagtgtgtgtatatatatgtgtgtgtgtgtgtccgtgtatatgtgctatacagccgtatggaagcatatacagccacgccaagggactcactgccgacagaggaccaggcccgggcaacatattggctataactgccctcctcctgcgatgctgtagtctccacaggccctccaccctccctgcccgtcccttctctctggctcctggacgtggaaatggcgggtttcctctttgctggtgtctccccctccctccagcccccctctcccctgtccttccagccccgtcagctctgagccccccggcctccagcctccccagcccccgccggataaccccccgtttctgttgcagattttgagttcctgctccccagcagctttgagtctgaaggacacgttttcattgctcccaggtagcttgcgtgtggccttgctgaggtgtcctcccctaccctgaccgccccggccccacctcctgcactgctgcctggagctctgtgtgtctgtgtcctgtgcagtgtcatcccccggcccccatacatcgcccggtatgcgcggctgtgtgcatacccaggccatgtaccgcaccaggcagcagtggccagctgcctcacggccctagctcccaccaggccggggcaggagggctccagactcatctgctgactttccctgccctcccaggcaaccaggcaggagccctttccgccctggggtggctgtctgtggcatgcccacccctcgccaggcagctgctgctctggtttgtggtgtcctgcccatccccccaaccccgcaccccatcgttgtcctgtgtcagtcggtgttcgtgtgggtctgggggccgagccagccagagcccctgtcggcagtgccgggtctaggcgtggtacttcacttggggggttgggggaggagagtgggggctttgaggagctgctccatcagatgaggagacggggccccgagcaagcccaggcctggaccatcccggagtgcacgctcagtgtgcacacacacgttctcatgtacacaccgtctgcctttggcccatgtctggggaggccgggtcccctgggtgctgaagcccttccatgacccaggcttgggatgagggcaggtgggtggatgcagctgacaagagacccaggggcactggaaggcagcacacgggggctctggacatgcctcaccttcgtgtgtgcacgtatgtgcatgcacccagtttctctgtgactctctctgtagatgtgtgtatttgtgagtcaccatgtacatatgtaagagtctgagcataaatgtgggggtggctctgtgtgttagtgaatgtgggaaggtgtgaaaagacctatgtggcccacatgaccctgaggaagctctcttgaaggcagggaccctattcgtttttgtcatctctgtgtctgtggctcagaagagctcaataaatacgtggagggtgagtgaatgaagtacctcacaaatgtgcacgtgcatactgtgtatacaggagagactgcaagtgacttggtgtatctcaagcacagtcgtgtgggtgtcaccctgggtgtgtccaatgtggcctctaggcacagaggtgcaggctgtacactgcacaaaggccctgggggccaaggagagagtggggcctgagacccagttccatgtgcccttaccaagccatgagccctaccacagcttggggaagtggcacacgttcaaaagccccacagttagtgccatatgggacaatgaagcggtccctggtggcagaggtatgaatgaggggtcgagcgagagagagctccacctatcagggtagagggattgctcccaagacttcctaggcagcaagccccaagcagaccccctcacgccccacagccccatgttctctggacccagagcctgaatgcagtgagggtcttgaggggaggagcattccaggcagagggaacagccagtcggaggacccacatgttcccactgactttctgacaccctctgtgctatgatgaaaaaagcgagggtcagagagcgtgagtgagttacctaacggcacacagccaggaagaggcagggtgaggtcttaggctgacaaaaagccagtgcttgtacttgggtcccatctggtgcccatgggaatgctctagggcatacacgtggatgagcaggccgccaggcatttcctggggcctttcaggtgcactatctgggtccagctacaccggagagacgggaggctctgcggagccatgcccaggagaaagcagctgcccgaatggagaaagtagaccctcattcttgtgtcagctctgccccgactcagacccgagcagcctgccaggcatgtagcagctgcagccaggaagaacccatgtgcccctccctgaggcccaggcttctcagtgaatggccaagtgggcctgttgggaagccttgaccccattgccctgtccagccccccaagcccactcttcttgcccctccccatccctagagagtactgcaaggacctgaatgcctcagacaacaacaccgagttcctgaaaaactttattgagctcatggagaaagtgactccagactccaagcagtgtgagtgcctggcagggcagctggctctgggcagtgcccaggcagcatggggccagcccagaggaacccagaggccgggcaggtgtggaaataagcaggcacaagctaagggctgggcctgggccagggccaggtcatggaggaggctcctggtggagccttaagggtgggggtgagggtgggcaaggagctgcaagaagatgcccccacccccacccctcccctcctgttccaggcaacaacttccttctgcacaacctgatcttggacacgggcatcacgcagcagctggtagagcgtgtgtggagggaccaggatctcaacacgtaggcatcacccagcctgtgggggcagaaggctaggatgggcccagaggccctggacctgcccagcagaaggcaggcctgtgaccccacccccctgctacccccaggtacagcctactggccgtgttcgctgccacagacggtggcatcacccgagtcttccccaacaagtaagtgacctatcccactacccaaaccctgcccctgccagggaacctgcatctgttctgcccagaggcctccttgcatctgtggagaccactgtccccgacaagccaccccttacctaccagtctgcctcttgggtgctccagggcagctgaggactggacagagaaccctgagcccttcaatgccagcttctaccgccgcagcctggataaccacggttatgtcttcaagcccccacaccaggatggtgagtgtccccgcagtgtgcccagcagcaggcagggagcctcagcttccctgtctgctcagccagaactgggctctgctgtctgaggcccctctccaacacaaggctggctgaggccagggcagacgtgaaaagagggatagactgtgccaaacactgtcctgagtgctgggtgcttgggctggagtcatcccgggattggactgctgggtttgtaggacccagcatagagtggtcagtgtggccgccagaccccactcctgacttccccacccaacccccagccctgttaaggccgctggagctggagaatgacactgtgggcatcctcgtcagcacagctgtggagctcagcctaggcaggcgcacactgaggccagcaggtgaatgtttgggacagaggtggggaaacaggcaatggacagggtactgcctgggcaggtagcactgatggtcccttgctctcccccaaagtggtgggcgtcaagctggacctagaggcttgggctgagaagttcaaggtgctagccagcaaccgtacccaccaagaccagcctcagaaggtatttgggcaggggcgggggcagtaacccagcagtgcccttcctggagtcccctggaacccccaccaaccctccactcagtggctccaacacctacatggaggcagggccagctgcagatggcctggggaaccggatgtatgaaaggtgatgggagggaggaaaactggtgggtggcttacggtcctcactctctgcccagcagtgcggccccaacagccactgtgagatggactgcgaggttaacaatgaggtgtgtgtgccctgaacctaccctggaccctagcttaccccacttccagacttcctagtcccagccgcgactcccagcacatcccttggcctgtgggtctcaacatccccaccctgacttcacagccttcccaggactgggggagtgatgccccccaactctgaaccactggactgcctgcggtggaaggtccggggcccagcccctctccattttcctccccattcccttcctcctaggacttactctgtgtcctcattgatgatggaggattcctggtgctgtcaaaccagaaccatcagtgggaccaggtgaggatcaggaagagagtgaaagaagagagtagggatttgagccttctaggggtgtagcactgccagccctgtgaccatggctttctcctgacatcctcaggtgggcaggttcttcagtgaggtggatgccaacctgatgctggcactctacaataactccttctacacccgcaaggagtcctatgactatcaggcagcctgtgcccctcagccccctggcaacctgggtgctgcaccccggggtgtctttgtggtgagtccccagagatgcctggactggagatgggggggactgggagacctgcccacagatgaccccctacctctgacatttgataaagctgggggtgacctagggcgaggggcagcagtggcagtccacgcccctctctccactgcagcccaccgttgcagatttccttaacctggcctggtggacctctgctgccgcctggtgagtcctgagcgggaggtgggtagagaaggtgctccctggccgggagggctcagaagagaagtagggcatggcatcgtcctctgctgaccacctgcactcggctccccgtgcgctgcaggtccctgttccagcagcttctctacggcctcatctaccacagctggttccaagcaggtaggtagggctttggaggcgcctcctcaagtccgggtccccaatctgagctaagacgactccatggggagggtggggtctacgactgagggaggccggagaccttgccagggtctgtgggcggagctgaggcgctctgggccctcgcagaccccgcggaggccgaggggagccccgagacgcgcgagagcagctgcgtcatgaaacagacccagtactacttcggctcggtaaacgcctcctacaacgccatcatcgactgcggaaactgctccaggtgctggcagtggggcgggaccagaggccaagggcggaacctgtgagcggggcgagacgctcgggaggatggaaggggcggggcctccgagcggccgggggcggggccgcaggatgggggtgggtcagggcggggcaaactcaacgccccgcctttccgggctgcccgcaggctgttccacgcgcagagactgaccaacaccaatcttctctttgtggtggccgagaagccgctgtgcagccagtgcgaggctggccggctgctgcagaaggagacgcactgtatcctgcccccgccctccccgccgcccgctccccctctgccccgcgcgccccctccgtgccgccgccgccgtccgcctccttgactccccacccatgcccagcggacggcccggagcagtgtgagctagtgcagagaccgcgataccggagaggcccgcacatctgcttcgactacaacgcgacagtgaggagagggggcggtggacccgaaatcccgcggccttgcgcccgcccaggccgaccagctccttgtctctccccgcaggaagatacctcagactgtggccgcggggcctccttcccgccgtcgctgggcgtcctggtctccctgcaactgctgctcctcctgggcctgccgccccggccgcagcctcaagtcctcgtccacgcctctcgccgcctctgagcaccctgccccaccccacctccactcccacctcacccggcctcttcgcctttcccaccctcctgccccacactccccgccttagagcctcgtccctccctcactgaaggacctgagctggccaggccctgagagtctggtctgcgccttgggatggggagtcccaaagcgggacgccgcaggtgtttggcacccaaatcacatctcacctccgaactgttcaagtgtccccagacccttcttgcctgctgggctccccccagtgggatgggacagggaggccacacgcactggtgccaaaaccaggcctctgctgccgcccttcctggaggctgcctatgttgggggggaccctgcctcagctgacccggcctctctgccccacccaagcccaaacttggtttctgtgagaatagtggaggaaggtgagatggccagtttgaagcctgtgcctcccagcttaaatcctagcaggagagaggctctggggcagcccccatgggctcctgcccctttcaggcctacagccacatccccaagcccaccaggtgtcaggatagtcacagtgataccagttcagacactaccccatatacacctggaacattgaggatggaaactggactcacattcgacataccccactgggcacacgcacaaacacacacactatggggtggggtgggtgtaggggcttacaaagccttacacagggcgaggggttggtgggagggttggcacctgcacactccatctcctgctcaccacctgcctctaatctgagctgcagcctggctggtcctcccatttctaaagctgaatgtcaaacagtgccaaatgctggggcagggggtgaagaaccctctgtcccacccctagccaccagtgtcctccaagtgccccctcacctctccaggtgctcattgtaaccatttctcactagtgtcaggcccccagtgggaccacatgccactgcctgcacctttcggcagaggaacccccaccagacatcaccctttgccttagcaggggtgactttgtctctcctggctgggccatccttccgccaatctggcccttacacactcaggcctgtgcccactccctatctccttcccacccctacacacacactccctgcttgcaggaggccaaactgtccctcccttgctgaacacacacacacacacacacacacaggtggggactgggcacagctcttcacaccattcattctggtcatttcccccaaaggcatcccagcctgggggccagtggggaactgagggcaaggggatatagtgatggggctcagatggactgggaggagggggagggtgatgcattaattaatggcttcgttaattaatgtcatgttgcttgtcgctttctcagtgtgtgtgtgtggtccatgcccactgctggtgccagggtgggtgtccatgtgcacccggcctggatgccagctgtgtccttcgggggcgtgcgtgtaactgtagtgtagtcaggtgctcaatggagaatataaacatatacagaaaaatatatattttaagtttaaaaaacagaaaaacagacaaaacaatccccatcaggtagctgtctaacccccagctgggtctaatccttctcattacccacccgacctggctgcccctcaccttgggctgggggactggggggccatttccttttctctgccctttttttgttgttctattttgtacagacaagttggaaaaacaacagcgacaaaaaagtcaagaaactttgtaaaatatcgtgtgtgtgattccttgtaaaatattttcaaatggtttattacagaagatcagttattaaataatgttcatattttcacttcaaatggttcccatccactgtatcagcttgggggtgaggactgggtagctatgaagacagttggccaagacctcagagtcccacttagtgctctgcagggggtgaagaccatggtagcccaggtccctgtcaaccacagggcatggcacttgcttccaccagttataataggtgccaggcccttgacatacattgtctcataacatctcaaaaagctgtcttttaaaaacaagcaagacaggctgggtgcggtggctcatgcctgtaatctagcattttgggaggccgaggcgggcagatcacttgaggtcaggagtttgagaccagcctggccaacatggtgaaaccccgtctctactaaaaatacaaaaaaattagccaggcatggtggcatgcgcctgtaatcccagctacttaggaggctgaggcaggataattgcttgaccccaggagacggaggttgcagtgagccaagattgcgccaccgcaccccagcctggatgaccgagcgagactcttgtctcagaaaaaaaaaaaatacaagcaaaacaaacaccctcccagagcctgaaagccaggaccctggagggaagaagacagatcagagatgctggtttagtggggaggtggatctggcagtctggtcagaccaccagggcctgacagggcctctgccgggagctatgagtgagcacctggccagtgtccctacggcccaggaagccctgaccacaagtgcagcaacggctccctcctggcccacaggagcttgaggccgcagctgcttaaactggagccataggccaaacttcatttttgtgaatcctctcaagcttaggccctagttcattttcaccctagaaggtgtgacctttgcgatcttctcatgtggagagaattataacctgtaaccaccagagcacaggtgtccctgccttcccaccacagtcctctctctcctcccaacactctgctctctgcgcactgacctggctgagtcctcgccacagtctctggggtgggtactagtgtatccccataccacagatgagcaaactaagaggagaaagcctttccccccaggtgagaaggctaaaaaccagcaaagattttagagaagaggtggccaccaagggttggggagcttggatgctaaatagatgaaggggcttcgaggcctcagccaagatggagactttttctgtctcctctgcagggttcggctgcagagcaatgcctaatccacaacccccaagacagctcccatggcctgcaagagaccgtgcaatcttggatagggttgtaagataaaatacagaacaccctattttgaatttcagatcatgaacgagtttttagtatggaagtgtttcaactattgtgtgggacatacctatactgaaaaactgggggctgggcacagtggctaacgcctgtaatcccaacactttgggaggctgatgcaggaggatcgcttgagctcacgagttcgagatcagcctgggtaggatggccaccccgcccctgcccatgtctctacaaaataaaaaaattttaaaaattagctgggcacagtagtgtgtgcctgtagtcgcagctaatcaggaggctgaggctggaggatcccttcagcccaggagttagaggtggcagtgagctatgattgtgccactgcactccagccttggacaaagctagaccctgtctcaaaaaaaaaaaaaaaaaaaaaagggggcagggggacatgattatactcgaagattactcattgtttatctggaattcaaatttgactgagcatccttattttgatttgctaaaactggcaaccttacccagatgtggcaaccagtgggaacccagaccccagaaaaaaagcatcagcaccctttttaacctgtaggccatgcacacatcagcacacactgaaatcagtggctgaaaggaagggatcctgtgttttataaaagcactttgtcatagaattattttaattatatggacagctttttgttttgttttgagacaaagtttcgctcttgttgcccaggctgtagtgcaatggcatgatcttggctcaccgcaacctccgcctcccgggttcaagcgattctcctgcctcagcatcccgagtagatgggattacaggcatgtgccaccacacctggctaattttgtatttttagtagagatgaggtttatccatgttggtcaggctggtctcaaactcccgacctcaggtgatctgcccgcctcagcctcccaaagtgctgggattacaggcgtgagccaccgtgcccagcctatatgtacagttttttaaaagtaactccatatacaaaaaaaaaaaaaagacacagaacacaacctgtcagaagtcactgtggcgtgaagtgggaccagaacaggcctagcccaggcttgtggagagacctggcttgtagagagacctctcatcctccgcagttatcagaagtccctggtggggaggagggtcactgagggctgcccagcctcgtccctatgcgggagggagccctaggttcgtgctccaggtccacctcacttggaaaaagggcaacgtgaaataacaaacaaaaaacttttccaagtgggagaaaacaaacaaaaaaaggcaacatgtgcagcactcgctgagcacccagggtggactggcattttacacccctttcccctttgattattaggacaggaagatcatgtcatcagctacattttatggcccatgaaactgagtttcaaaaaggttcaggaacttaaccaaccaatgccacacagcctccgaggcagagcaagggttccagcctgggtcaggtcccattcaccagaccacggaggttctgtttctcacacagtgacacctacccacacgccagccaacaaggacacactcgctcagaggtacacgcacaaatagagctactcttcctagggaattcagcaagtgtgggggctagagctgtgttgcttcccgaaccctcaccgccgctttcaggggttagagatgctaattcatcccttcccacctcctgagaaccgacggaaacggtccctgagaactacaactcccagcacaccccgcgctcaccacaacgggaccggtccgtgctcatggcctcctgggacttgtagttctagccagaaccctgttcaactcttccccggctgcaaccaaggactccgtatcccagcatgcagaggagccggaagacaggcgcttagaggacagcccgctgccgccggggacgcgcaggcgcagcacccctgtttgtcggccccccgagagaagaggtacggtcgaagccaggagccaggccgagcgggagctgaccaggcttgactcgggtacagaacgaggcaccagtccccttgcgaaccgaagggcctcgcagtggatggaggaggcccagccctgaggtcaacgccaaccaggctagcctggcacggggcctacagggtgggtaggcgggcgtgccgcagccgtccagggccttccctcaggtcccgggcgaggggcctacgctgcggcccggcaacaaggcccgactcggcccctcgggaccagagccccacccgatcggaagcggatcctttaccagggccataggccagtgactaggccgggcctgggcctcccatcggggccggactaggacgaggccccggggaggcccctggcctaccagacccttttctcaggccgacagccgccaggaagatgcaacgtgccctgccaggcgcccgccagcacttgggggccattctggccagcgccagcgtggtggtgaaggctctgtgtgcggcggtactattcctctacctgctctccttcgccgtggacacaggctgcctggcggtcaccccgggctacctctttcctcccaacttctggatctggaccctggccacccatgggctgatggagcagcatgtgtgggacgtggccatcagcctgacaacggtggtggtggccgggcgtttgctggagcccctctggggggccttggagctgctcatcttcttctcagtggtgaatgtgtctgtagggctgctgggggccttcgcctacctcctcacctacatggcttccttcaacctggtctacctgttcactgtccgtatccacggcgccttgggcttcctaggtggcgtcctggtggcactcaagcaaaccatgggggactgtgtggtcctgcgagtgccccaggtgcgcgtcagtgtgatgcccatgctgctgctggcgctgctgctcctgctgcggctcgccacgctgctccagagcccggcgctggcttcctatggcttcgggctgctctccagttgggtatatcttcgcttctaccagcgccatagccggggccgaggggacatggctgaccactttgctttcgccactttcttccctgagatcctgcagcctgtggtgggtttgctggcgaacttggtgcacagcctcctggtgaaggtaaagatatgccagaagacggtgaagcgctacgatgtgggtgccccatcctccatcaccatcagcctgccaggcacagaccctcaagacgccgagcggagaaggtactgtgaaattttccaaaatcttgtcaagctaggagcatactggtcgagtcacatgccatctgttgaggtgttcgctgtacataggtggagacctacagtcaggtattggggcacatccggaaagacaaaatcagtctttggccttaaggaactcagcagttaggtgtctggggtccacgaggcacttttctcaccactcgggccacttaataagtctcaagaaatgcagtttcctttggtgctgtgaagtcccagtggagggacacagaaccctggccttgcctcagaatctcagaatcctagacattgggcctgtgggagccagaagcaacctgctggtactttcccctgtgaggaagggacagggaaggaggcctggggtcctcaaaaggtgatctgggccactccaatttccaaatgctgtgtcctcttcctgggctttaactcagatgctgtgcttctctgccacttacttattgagagggaagcttggggtattaccacatttacctctgtctccagcaagcatgtgtcaccaaaaccagggacaggctacatgacccactgagggagcctgctgacaccagggagtggcgatgaccctttcattatctgtaaaccaagctatccacagcatcaggagtcccagctgaattattcactgaatgcactttggccagggcaggagggatctttttaaattcagcttactctctctcccagatctgtggagccagcagagtggtcccagccttcataagatccacagctccatttccaacattattcctcactgttttgaggcaattactcgagtagtaaaatctgggacgggctttgtcttttgcattgccaaggctcctgcttttgctcacctgtgaatggggttgtggcaggaagctctatgaatttagctgcagttatccctgtatttactctccactgggctatggaattgagtgtgggacacactcctttcttgaaggagttccagctggggaagggccacagatcactatggcccaaggtatggtaggtgttgaaaagtatatacagcatgctgcagggcataattctgggccctagagcttgggtctttataggtgataagccctaaggacagaagtctctcttaaccttagctggtattaaagatggggccaggtgagctgggcctggtaggaattgagctgtccctcagagccattcaggtggggccaggccagtggggacccctcctccactgagaggtgttggaatgttagggttggctggacattcaaaaacctctgcctaggcccaagaaaatggacaggggggaagcaggttggtggggaggaagggagggtcaagaggcgggttcttggcatagccttatggttgttagcttacatgggggtggcggttattcctccagccagtttgacatctgactgcatggccacgcccaactccaaagggctaccaggagagggaggcagggtttcctatctgtctctctggtccttgtgaggaagtgactagcgtaacactagctctctgccttggcaggctttagatggaactggcaagggcatcatcaggatggcagcctgggtagcagcagggaaagactgtcctgtctataccaacttgtcatgtgtgagactgacgggcaggggggaagcgtgctagggctttctacacctgtgcccttgttgcctctcttgtcgtgttccctgacatggtggagattttggttctcagctggaacctgaaaggctacacaggctgtccccacattggtggcacagagaggctgaggtataggagtccacagtggtcactgttgaaacggttccctggcagctgcagcactccaccttctggtgggtcagggtcccaagcacatgtgtaaaccttcttctgttggactttcccacctgccctcaaagtggggcctctaagggtccaccctgtggaagcagtaggctctggcctgtgcctacccatgtgagctgtttctccttcttctcctcttgcaagggctccgctaagtccctgctctaacaagggccttggtggctttgggggttcttctgagagggagaatattagcatcagttaggaggggtagactcacccaagttggccctgcttcctgggctgagagccaagggaggtgttgaattccagccttccccattgacccttgccaggaggctcaagatacccctaaccaggagagggggagaattaataacccttcccttggatgtgatgccagcacccaggcagaaactcctggaaactccagaacttgccgttccacccatctgccctagggcactagttccactgacccttagataccaccctcagaaccattcctggtggctggcctcgtgggcagtctggcagacacccagctgaccttcccatcccggaggtgcctcagctatggagggaagattcttagagcctttgggttatcattctgatggcagagtgggtcctaaaccaatctctggggagtcccaggctctgcatggtgaaggggaaacataggattctgggggaggagtctaggtggtacggtgaggagtcagcctgctgcggaagggtagagggcatgagccaaggccaaacccagagtgacctttcctctctcctctggccccaggcaactggccctgaaggcactcaatgagcggctgaagagagtggaagaccagtccatctggcccagcatggatgatgatgaagaggagtctggggccaaggtggacagccccctgccctcagacaaagctcccacacccccagggaagggggctgccccagaatccagtctaatcaccttcgaggcagctcccccgacgctgtaactccagaccaccttgagtgtggcacctcccctcccaagccccccttgacatcctctcagctactccagggcacctgactgctctgaggagagggaagaaggcctgctggggctttccatggccttctgctgtttctcgccaacactacccaggactcttgctacctggttccaactccagacaaccactatgccaggcccggagcctctgaggcatcggccagtccaggccctcatctgaggtaagaatgtacatcagctggcagccccaagcaagtggctgcagggacactgatgccacagctcctgggccggccctcacatctgaaactggttgccgagagccctgagccaaggcaaggatttgccaaaaatgttctgggggcccagcaaatgcaggagccgacctggggctgcacatccctgcccatccccagaaagactgttcctgtcaggatttgtttccctctgctgtggcggtgactgcttctggaccagaacagctccagctcccaggtattttctacaggaccacttgagtgggcagccaagcccaggctcgcagtatcaataaagcagttctctgaggaatgactcctgggctcttgtcaggccaccttgtgcagccccctcatcacgttcaactgcaatgttagacagggacttgattgtctccatggtaactccagctggataagaagcccattgccccagctccccaccaccgccaccaccaccaccacatgcgcactgccaagcagccttccaagagctattgcctcagactcttactccttttttctttccctccaaaccccaatctgggaggccttctgtccctgcctagatctgatgataagggcctctccatcataaggcgctgttcttacccatggtttatctctaagacagaatgctcagttcttgccacccctggagacaactcacccccagctcccagttattgtatgtatctaacccccacagtctggagactccagcacagtagacagttggggggacagaaaggacacacagctgtaccattcacagctacagctctagggcctgccagggcccggagtggcctgggaggctcagcagctagaccctggggatttgtgtgctaggagagcttcagcccctcagggagcagccaggggtcgggggtggggggtccccatcttgcccagctgcccattttcctgtgctgatggcattaacaagaaccatccccaactctgggctgcttctcccatcaatcttttcagtcattttttacaaattttttacttttttctctcctaaaatttctgaacatacagtacaagtatgagctgccttgcaggagaggcagtcttgcagccccagcttcatccagacacatgatgcctatgttcctctgggatgacagagaaaggggaaggaaatgggaggcactccagcatgaggagcaggaattcacacacgggcctccaaatgcccaactgtcccagtgcctgaggtgtcccctgactcagctgagagagttcaacaggtccctaggcccagctcctacatggaggggcaaatccaggcttcccctaggctgggaagagctcatggttggatcctcttgcggtataggtaggcattgctcacctggttcataatgaccaagctggtgaggacagggcataatacagccaggtaccaggctgcaccagtgacagaggcagtgaaccagagtgagcacatgcccagcaagaggctggcactacccagcaggtagcccaccagcccagaagtagcatggtatagcttgagcttcgccaggggccatcggggcagcagcttggggtagagcagccccaccccacctgagcactgcagccctgcccacagcacagccagcagccctgcctgcccatgccgcgtaaccaggtgggctttgccaagctgctctttgtggaggatgacaaggccgaggcccagcagtgcacacagcagggccagcagctgcagcacccagtggcagcgtgctcggcctttccgtgagagggagtgcagcagcgaactctcaggagaaaacaccagtagtgcctcggtcatcaggaaggagaactgaggaaacaggggatgggaagctcaagtgagggtgctgccccagaagaggagaagagggctttatgtaacccttagctgccagtgagtctgggctgattcccctttttctttctctccccactgacaagactatccatttggtggggcaagagtggaaaaccccatctgggatgatatatgtgccctgaataatctccacacttcctcctaggtgccagtctgaaatgtcatctgtcgtatgttaccaagcaaacacagggtttgagatgtggcagttataaatgattcacaagctttgtttccctaacgtggggctggatacaatttcttggcaagagctggccacatgggtgcactgtttcagggaaagttaggtgcatcaccagaaattaaagtaaaaagggacagaggtacatccaaatgcaatgtctcagctttctgcctagaggtgggtgaagcctcattgtgcttagacaaatcttacccatttgacctgggtcctgggtcttcattactctgattcaagtctctttttttttttttttttttttttggagatagtctctctctgtcacccaggctggagtgcagtggcctgatctcggctcactgcaatctccgccttccgggttcaagcaattctcctgcctcaggctcctgagtaactgggattacaggcacctgcc

SEQ ID NO: 171 - DNA, 5733 bp, Homo sapiens
cagcgcgcagcccgcagaggcgctgcggcccgtgcagccccggaggcccctcgcggagaaggcggcggcggaggagaggccgagttaccgcccgccgcccgcgcccccccaaccccgccgccgccgccgccgccgccactgccccccctccccgcggcgccgcatcttgaatggaaacatggcggtgccggctcggacctgcggcgcctctcggcccggcccagcgcggactgcgcgcccctggcccggctgcggcccccaccctggccccggcacccggcgcccgacgtccgggcccccgcgcccgctgtggctgctgctgccgcttctaccgctgctcgccgcccccggcgcctctgcctacagcttcccccagcagcacacgatgcagcactgggcccggcgtctggagcaggaggtcgacggcgtgatgcggatttttggaggcgtccagcagctccgtgagatttacaaggacaaccggaacctgttcgaggtacaggagaatgagcctcagaagttggtggagaaggtggcaggggacattgagagccttctggacaggaaggtgcaggccctgaagagactggctgatgctgcagagaacttccagaaagcacaccgctggcaggacaacatcaaggaggaagacatcgtgtactatgacgccaaggctgacgctgagctggacgaccctgagagtgaggatgtggaaagggggtctaaggccagcaccctaaggctggacttcatcgaggacccaaacttcaagaacaaggtcaactattcatacgcggctgtacagatccctacggacatctacaaaggctccactgtcatcctcaatgagctcaactggacagaggccctggagaatgtgttcatggaaaaccgcagacaagaccccacactgctgtggcaggtcttcggcagcgccacaggagtcactcgctactacccggccaccccgtggcgagcccccaagaagatcgacctgtacgatgtccgaaggagaccctggtatatccagggggcctcgtcacccaaagacatggtcatcatcgtggatgtgagtggcagtgtgagcggcctgaccctgaagctgatgaagacatctgtctgcgagatgctggacacgctgtctgatgatgactatgtgaatgtggcctcgttcaacgagaaggcacagcctgtgtcatgcttcacacacctggtgcaggccaatgtgcgcaacaagaaggtgttcaaggaagctgtgcagggcatggtggccaagggcaccacaggctacaaggccggctttgagtatgcctttgaccagctgcagaactccaacatcactcgggccaactgcaacaagatgatcatgatgttcacggatggtggtgaggaccgcgtgcaggacgtctttgagaagtacaattggccaaaccggacggtgcgcgtgtttactttctccgtggggcagcataactatgacgtcacaccgctgcagtggatggcctgtgccaacaaaggctactattttgagatcccttccatcggagccatccgcatcaacacacaggaatatctagatgtgttgggcaggcccatggtgctggcaggcaaggaggccaagcaggtgcagtggaccaacgtgtatgaggatgcactgggactggggttggtggtaacagggaccctccctgttttcaacctgacacaggatggccctggggaaaagaagaaccagctgatcctgggcgtgatgggcattgacgtggctctgaatgacatcaagaggctgacccccaactacacgcttggagccaacggctatgtgtttgccattgacctgaacggctacgtgttgctgcaccccaatctcaagccccagaccaccaacttccgggagcctgtgactctggacttcctggatgcggagctagaggatgagaacaaggaagagatccgtcggagcatgattgatggcaacaagggccacaagcagatcagaacgttggtcaagtccctggatgagaggtacatagatgaggtgacacggaactacacctgggtgcctataaggagcactaactacagcctggggctggtgctcccaccctacagcaccttctacctccaagccaatctcagtgaccagatcctgcaggtcaagtattttgagttcctgctccccagcagctttgagtctgaaggacacgttttcattgctcccagagagtactgcaaggacctgaatgcctcagacaacaacaccgagttcctgaaaaactttattgagctcatggagaaagtgactccagactccaagcagtgcaacaacttccttctgcacaacctgatcttggacacgggcatcacgcagcagctggtagagcgtgtgtggagggaccaggatctcaacacgtacagcctactggccgtgttcgctgccacagacggtggcatcacccgagtcttccccaacaaggcagctgaggactggacagagaaccctgagcccttcaatgccagcttctaccgccgcagcctggataaccacggttatgtcttcaagcccccacaccaggatgccctgttaaggccgctggagctggagaatgacactgtgggcatcctcgtcagcacagctgtggagctcagcctaggcaggcgcacactgaggccagcagtggtgggcgtcaagctggacctagaggcttgggctgagaagttcaaggtgctagccagcaaccgtacccaccaagaccagcctcagaagcagtgcggccccaacagccactgtgagatggactgcgaggttaacaatgaggacttactctgtgtcctcattgatgatggaggattcctggtgctgtcaaaccagaaccatcagtgggaccaggtgggcaggttcttcagtgaggtggatgccaacctgatgctggcactctacaataactccttctacacccgcaaggagtcctatgactatcaggcagcctgtgcccctcagccccctggcaacctgggtgctgcaccccggggtgtctttgtgcccaccgttgcagatttccttaacctggcctggtggacctctgctgccgcctggtccctgttccagcagcttctctacggcctcatctaccacagctggttccaagcagaccccgcggaggccgaggggagccccgagacgcgcgagagcagctgcgtcatgaaacagacccagtactacttcggctcggtaaacgcctcctacaacgccatcatcgactgcggaaactgctccaggctgttccacgcgcagagactgaccaacaccaatcttctctttgtggtggccgagaagccgctgtgcagccagtgcgaggctggccggctgctgcagaaggagacgcactgcccagcggacggcccggagcagtgtgagctagtgcagagaccgcgataccggagaggcccgcacatctgcttcgactacaacgcgacagaagatacctcagactgtggccgcggggcctccttcccgccgtcgctgggcgtcctggtctccctgcaactgctgctcctcctgggcctgccgccccggccgcagcctcaagtcctcgtccacgcctctcgccgcctctgagcaccctgccccaccccacctccactcccacctcacccggcctcttcgcctttcccaccctcctgccccacactccccgccttagagcctcgtccctccctcactgaaggacctgagctggccaggccctgagagtctggtctgcgccttgggatggggagtcccaaagcgggacgccgcaggtgtttggcacccaaatcacatctcacctccgaactgttcaagtgtccccagacccttcttgcctgctgggctccccccagtgggatgggacagggaggccacacgcactggtgccaaaaccaggcctctgctgccgcccttcctggaggctgcctatgttgggggggaccctgcctcagctgacccggcctctctgccccacccaagcccaaacttggtttctgtgagaatagtggaggaaggtgagatggccagtttgaagcctgtgcctcccagcttaaatcctagcaggagagaggctctggggcagcccccatgggctcctgcccctttcaggcctacagccacatccccaagcccaccaggtgtcaggatagtcacagtgataccagttcagacactaccccatatacacctggaacattgaggatggaaactggactcacattcgacataccccactgggcacacgcacaaacacacacactatggggtggggtgggtgtaggggcttacaaagccttacacagggcgaggggttggtgggagggttggcacctgcacactccatctcctgctcaccacctgcctctaatctgagctgcagcctggctggtcctcccatttctaaagctgaatgtcaaacagtgccaaatgctggggcagggggtgaagaaccctctgtcccacccctagccaccagtgtcctccaagtgccccctcacctctccaggtgctcattgtaaccatttctcactagtgtcaggcccccagtgggaccacatgccactgcctgcacctttcggcagaggaacccccaccagacatcaccctttgccttagcaggggtgactttgtctctcctggctgggccatccttccgccaatctggcccttacacactcaggcctgtgcccactccctatctccttcccacccctacacacacactccctgcttgcaggaggccaaactgtccctcccttgctgaacacacacacacacacacacacacaggtggggactgggcacagctcttcacaccattcattctggtcatttcccccaaaggcatcccagcctgggggccagtggggaactgagggcaaggggatatagtgatggggctcagatggactgggaggagggggagggtgatgcattaattaatggcttcgttaattaatgtcatgttgcttgtcgctttctcagtgtgtgtgtgtggtccatgcccactgctggtgccagggtgggtgtccatgtgcacccggcctggatgccagctgtgtccttcgggggcgtgcgtgtaactgtagtgtagtcaggtgctcaatggagaatataaacatatacagaaaaatatatattttaagtttaaaaaacagaaaaacagacaaaacaatccccatcaggtagctgtctaacccccagctgggtctaatccttctcattacccacccgacctggctgcccctcaccttgggctgggggactggggggccatttccttttctctgccctttttttgttgttctattttgtacagacaagttggaaaaacaacagcgacaaaaaagtcaagaaactttgtaaaatatcgtgtgtgtgattccttgtaaaatattttcaaatggtttattacagaagatcagttattaaataatgttcatattttcacttcaaatggttcccatccactgtatcagcttgggggtgaggactgggtagctatgaagacagttggccaagacctcagagtcccacttagtgctctgcagggggtgaagaccatggtagcccaggtccctgtcaaccacagggcatggcacttgcttccaccagttataataggtgccaggcccttgacatacattgtctcataacatctcaaaaagctgtcttttaaaaacaagcaagacaggctgggtgcg

SEQ ID NO: 172 - protein, 1142 aa, Homo sapiens
MAVPARTCGASRPGPARTARPWPGCGPHPGPGTRRPTSGPPRPLWLLLPLLPLLAAPGASAYSFPQQHTMQHWARRLEQEVDGVMRIFGGVQQLREIYKDNRNLFEVQENEPQKLVEKVAGDIESLLDRKVQALKRLADAAENFQKAHRWQDNIKEEDIVYYDAKADAELDDPESEDVERGSKASTLRLDFIEDPNFKNKVNYSYAAVQIPTDIYKGSTVILNELNWTEALENVFMENRRQDPTLLWQVFGSATGVTRYYPATPWRAPKKIDLYDVRRRPWYIQGASSPKDMVIIVDVSGSVSGLTLKLMKTSVCEMLDTLSDDDYVNVASFNEKAQPVSCFTHLVQANVRNKKVFKEAVQGMVAKGTTGYKAGFEYAFDQLQNSNITRANCNKMIMMFTDGGEDRVQDVFEKYNWPNRTVRVFTFSVGQHNYDVTPLQWMACANKGYYFEIPSIGAIRINTQEYLDVLGRPMVLAGKEAKQVQWTNVYEDALGLGLVVTGTLPVFNLTQDGPGEKKNQLILGVMGIDVNDIKRLTPNYTLGANGYVFAIDLNGYVLLHPNLKPQTTNFREPVTLDFLDAELEDENKEEIRRSMIDGNKGHKQIRTLVKSLDERYIDEVTRNYTWVPIRSTNYSLGLVLPPYSTFYLQANLSDQILQVKYFEFLLPSSFESEGHVFIAPREYCKDLNASDNNTEFLKNFIELMEKVTPDSKQCNNFLLHNLILDTGITQQLVERVWRDQDLNTYSLLAVFAATDGGITRVFPNKAAEDWTENPEPFNASFYRRSLDNHGYVFKPPHQDALLRPLELENDTVGILVSTAVELSLGRRTLRPAVVGVKLDLEAWAEKFKVLNRTHQDQPQKQCGPNSHCEMDCEVNNEDLLCVLIDDGGFLVLSNQNHQWDQVGRFFSEVDANLMLALYNNSFYTRKESYDYQAACAPQPPGNLGAAPRGVFVPTVADFLNLAWWTSAAAWSLFQQLLYGLIYHSWFQADPAEAEGSPETRESSCVMKQTQYYFGSVNASYNAIIDCGNCSRLFHAQRLTNTNLLFVVAEKPLCSQCEAGRLLQKETHCPADGPEQCELVQRPRYRRGPHICFDYNATEDTSDCGRGASFPPSLGVLVSLQLLLLLGLPPRPQPQVLVHASRRL

SEQ ID NO: 173 - DNA, 5730 bp, Homo sapiens
cagcgcgcagcccgcagaggcgctgcggcccgtgcagccccggaggcccctcgcggagaaggcggcggcggaggagaggccgagttaccgcccgccgcccgcgcccccccaaccccgccgccgccgccgccgccgccactgccccccctccccgcggcgccgcatcttgaatggaaacatggcggtgccggctcggacctgcggcgcctctcggcccggcccagcgcggactgcgcgcccctggcccggctgcggcccccaccctggccccggcacccggcgcccgacgtccgggcccccgcgcccgctgtggctgctgctgccgcttctaccgctgctcgccgcccccggcgcctctgcctacagcttcccccagcagcacacgatgcagcactgggcccggcgtctggagcaggaggtcgacggcgtgatgcggatttttggaggcgtccagcagctccgtgagatttacaaggacaaccggaacctgttcgaggtacaggagaatgagcctcagaagttggtggagaaggtggcaggggacattgagagccttctggacaggaaggtgcaggccctgaagagactggctgatgctgcagagaacttccagaaagcacaccgctggcaggacaacatcaaggaggaagacatcgtgtactatgacgccaaggctgacgctgagctggacgaccctgagagtgaggatgtggaaagggggtctaaggccagcaccctaaggctggacttcatcgaggacccaaacttcaagaacaaggtcaactattcatacgcggctgtacagatccctacggacatctacaaaggctccactgtcatcctcaatgagctcaactggacagaggccctggagaatgtgttcatggaaaaccgcagacaagaccccacactgctgtggcaggtcttcggcagcgccacaggagtcactcgctactacccggccaccccgtggcgagcccccaagaagatcgacctgtacgatgtccgaaggagaccctggtatatccagggggcctcgtcacccaaagacatggtcatcatcgtggatgtgagtggcagtgtgagcggcctgaccctgaagctgatgaagacatctgtctgcgagatgctggacacgctgtctgatgatgactatgtgaatgtggcctcgttcaacgagaaggcacagcctgtgtcatgcttcacacacctggtgcaggccaatgtgcgcaacaagaaggtgttcaaggaagctgtgcagggcatggtggccaagggcaccacaggctacaaggccggctttgagtatgcctttgaccagctgcagaactccaacatcactcgggccaactgcaacaagatgatcatgatgttcacggatggtggtgaggaccgcgtgcaggacgtctttgagaagtacaattggccaaaccggacggtgcgcgtgtttactttctccgtggggcagcataactatgacgtcacaccgctgcagtggatggcctgtgccaacaaaggctactattttgagatcccttccatcggagccatccgcatcaacacacaggaatatctagatgtgttgggcaggcccatggtgctggcaggcaaggaggccaagcaggtgcagtggaccaacgtgtatgaggatgcactgggactggggttggtggtaacagggaccctccctgttttcaacctgacacaggatggccctggggaaaagaagaaccagctgatcctgggcgtgatgggcattgacgtggctctgaatgacatcaagaggctgacccccaactacacgcttggagccaacggctatgtgtttgccattgacctgaacggctacgtgttgctgcaccccaatctcaagccccagaccaccaacttccgggagcctgtgactctggacttcctggatgcggagctagaggatgagaacaaggaagagatccgtcggagcatgattgatggcaacaagggccacaagcagatcagaacgttggtcaagtccctggatgagaggtacatagatgaggtgacacggaactacacctgggtgcctataaggagcactaactacagcctggggctggtgctcccaccctacagcaccttctacctccaagccaatctcagtgaccagatcctgcaggtcaagtattttgagttcctgctccccagcagctttgagtctgaaggacacgttttcattgctcccagagagtactgcaaggacctgaatgcctcagacaacaacaccgagttcctgaaaaactttattgagctcatggagaaagtgactccagactccaagcagtgcaacaacttccttctgcacaacctgatcttggacacgggcatcacgcagcagctggtagagcgtgtgtggagggaccaggatctcaacacgtacagcctactggccgtgttcgctgccacagacggtggcatcacccgagtcttccccaacaaggcagctgaggactggacagagaaccctgagcccttcaatgccagcttctaccgccgcagcctggataaccacggttatgtcttcaagcccccacaccaggatgccctgttaaggccgctggagctggagaatgacactgtgggcatcctcgtcagcacagctgtggagctcagcctaggcaggcgcacactgaggccagcagtggtgggcgtcaagctggacctagaggcttgggctgagaagttcaaggtgctagccagcaaccgtacccaccaagaccagcctcagaagtgcggccccaacagccactgtgagatggactgcgaggttaacaatgaggacttactctgtgtcctcattgatgatggaggattcctggtgctgtcaaaccagaaccatcagtgggaccaggtgggcaggttcttcagtgaggtggatgccaacctgatgctggcactctacaataactccttctacacccgcaaggagtcctatgactatcaggcagcctgtgcccctcagccccctggcaacctgggtgctgcaccccggggtgtctttgtgcccaccgttgcagatttccttaacctggcctggtggacctctgctgccgcctggtccctgttccagcagcttctctacggcctcatctaccacagctggttccaagcagaccccgcggaggccgaggggagccccgagacgcgcgagagcagctgcgtcatgaaacagacccagtactacttcggctcggtaaacgcctcctacaacgccatcatcgactgcggaaactgctccaggctgttccacgcgcagagactgaccaacaccaatcttctctttgtggtggccgagaagccgctgtgcagccagtgcgaggctggccggctgctgcagaaggagacgcactgcccagcggacggcccggagcagtgtgagctagtgcagagaccgcgataccggagaggcccgcacatctgcttcgactacaacgcgacagaagatacctcagactgtggccgcggggcctccttcccgccgtcgctgggcgtcctggtctccctgcaactgctgctcctcctgggcctgccgccccggccgcagcctcaagtcctcgtccacgcctctcgccgcctctgagcaccctgccccaccccacctccactcccacctcacccggcctcttcgcctttcccaccctcctgccccacactccccgccttagagcctcgtccctccctcactgaaggacctgagctggccaggccctgagagtctggtctgcgccttgggatggggagtcccaaagcgggacgccgcaggtgtttggcacccaaatcacatctcacctccgaactgttcaagtgtccccagacccttcttgcctgctgggctccccccagtgggatgggacagggaggccacacgcactggtgccaaaaccaggcctctgctgccgcccttcctggaggctgcctatgttgggggggaccctgcctcagctgacccggcctctctgccccacccaagcccaaacttggtttctgtgagaatagtggaggaaggtgagatggccagtttgaagcctgtgcctcccagcttaaatcctagcaggagagaggctctggggcagcccccatgggctcctgcccctttcaggcctacagccacatccccaagcccaccaggtgtcaggatagtcacagtgataccagttcagacactaccccatatacacctggaacattgaggatggaaactggactcacattcgacataccccactgggcacacgcacaaacacacacactatggggtggggtgggtgtaggggcttacaaagccttacacagggcgaggggttggtgggagggttggcacctgcacactccatctcctgctcaccacctgcctctaatctgagctgcagcctggctggtcctcccatttctaaagctgaatgtcaaacagtgccaaatgctggggcagggggtgaagaaccctctgtcccacccctagccaccagtgtcctccaagtgccccctcacctctccaggtgctcattgtaaccatttctcactagtgtcaggcccccagtgggaccacatgccactgcctgcacctttcggcagaggaacccccaccagacatcaccctttgccttagcaggggtgactttgtctctcctggctgggccatccttccgccaatctggcccttacacactcaggcctgtgcccactccctatctccttcccacccctacacacacactccctgcttgcaggaggccaaactgtccctcccttgctgaacacacacacacacacacacacacaggtggggactgggcacagctcttcacaccattcattctggtcatttcccccaaaggcatcccagcctgggggccagtggggaactgagggcaaggggatatagtgatggggctcagatggactgggaggagggggagggtgatgcattaattaatggcttcgttaattaatgtcatgttgcttgtcgctttctcagtgtgtgtgtgtggtccatgcccactgctggtgccagggtgggtgtccatgtgcacccggcctggatgccagctgtgtccttcgggggcgtgcgtgtaactgtagtgtagtcaggtgctcaatggagaatataaacatatacagaaaaatatatattttaagtttaaaaaacagaaaaacagacaaaacaatccccatcaggtagctgtctaacccccagctgggtctaatccttctcattacccacccgacctggctgcccctcaccttgggctgggggactggggggccatttccttttctctgccctttttttgttgttctattttgtacagacaagttggaaaaacaacagcgacaaaaaagtcaagaaactttgtaaaatatcgtgtgtgtgattccttgtaaaatattttcaaatggtttattacagaagatcagttattaaataatgttcatattttcacttcaaatggttcccatccactgtatcagcttgggggtgaggactgggtagctatgaagacagttggccaagacctcagagtcccacttagtgctctgcagggggtgaagaccatggtagcccaggtccctgtcaaccacagggcatggcacttgcttccaccagttataataggtgccaggcccttgacatacattgtctcataacatctcaaaaagctgtcttttaaaaacaagcaagacaggctgggtgcg

SEQ ID NO: 174 - protein, 1141 aa, Homo sapiens
MAVPARTCGASRPGPARTARPWPGCGPHPGPGTRRPTSGPPRPLWLLLPLLPLLAAPGASAYSFPQQHTMQHWARRLEQEVDGVMRIFGGVQQLREIYKDNRNLFEVQENEPQKLVEKVAGDIESLLDRKVQALKRLADAAENFQKAHRWQDNIKEEDIVYYDAKADAELDDPESEDVERGSKASTLRLDFIEDPNFKNKVNYSYAAVQIPTDIYKGSTVILNELNWTEALENVFMENRRQDPTLLWQVFGSATGVTRYYPATPWRAPKKIDLYDVRRRPWYIQGASSPKDMVIIVDVSGSVSGLTLKLMKTSVCEMLDTLSDDDYVNVASFNEKAQPVSCFTHLVQANVRNKKVFKEAVQGMVAKGTTGYKAGFEYAFDQLQNSNITRANCNKMIMMFTDGGEDRVQDVFEKYNWPNRTVRVFTFSVGQHNYDVTPLQWMACANKGYYFEIPSIGAIRINTQEYLDVLGRPMVLAGKEAKQVQWTNVYEDALGLGLVVTGTLPVFNLTQDGPGEKKNQLILGVMGIDVNDIKRLTPNYTLGANGYVFAIDLNGYVLLHPNLKPQTTNFREPVTLDFLDAELEDENKEEIRRSMIDGNKGHKQIRTLVKSLDERYIDEVTRNYTWVPIRSTNYSLGLVLPPYSTFYLQANLSDQILQVKYFEFLLPSSFESEGHVFIAPREYCKDLNASDNNTEFLKNFIELMEKVTPDSKQCNNFLLHNLILDTGITQQLVERVWRDQDLNTYSLLAVFAATDGGITRVFPNKAAEDWTENPEPFNASFYRRSLDNHGYVFKPPHQDALLRPLELENDTVGILVSTAVELSLGRRTLRPAVVGVKLDLEAWAEKFKVLNRTHQDQPQKCGPNSHCEMDCEVNNEDLLCVLIDDGGFLVLSNQNHQWDQVGRFFSEVDANLMLALYNNSFYTRKESYDYQAACAPQPPGNLGAAPRGVFVPTVADFLNLAWWTSAAAWSLFQQLLYGLIYHSWFQADPAEAEGSPETRESSCVMKQTQYYFGSVNASYNAIIDCGNCSRLFHAQRLTNTNLLFVVAEKPLCSQCEAGRLLQKETHCPADGPEQCELVQRPRYRRGPHICFDYNATEDTSDCGRGASFPPSLGVLVSLQLLLLLGLPPRPQPQVLVHASRRL

SEQ ID NO: 175 - DNA, 4182 bp, Homo sapiens
cagcgcgcagcccgcagaggcgctgcggcccgtgcagccccggaggcccctcgcggagaaggcggcggcggaggagaggccgagttaccgcccgccgcccgcgcccccccaaccccgccgccgccgccgccgccgccactgccccccctccccgcggcgccgcatcttgaatggaaacatggcggtgccggctcggacctgcggcgcctctcggcccggcccagcgcggactgcgcgcccctggcccggctgcggcccccaccctggccccggcacccggcgcccgacgtccgggcccccgcgcccgctgtggctgctgctgccgcttctaccgctgctcgccgcccccggcgcctctgcctacagcttcccccagcagcacacgatgcagcactgggcccggcgtctggagcaggaggtcgacggcgtgatgcggatttttggaggcgtccagcagctccgtgagatttacaaggacaaccggaacctgttcgaggtacaggagaatgagcctcagaagttggtggagaaggtggcaggggacattgagagccttctggacaggaaggtgcaggccctgaagagactggctgatgctgcagagaacttccagaaagcacaccgctggcaggacaacatcaaggaggaagacatcgtgtactatgacgccaaggctgacgctgagctggacgaccctgagagtgaggatgtggaaagggggtctaaggccagcaccctaaggctggacttcatcgaggacccaaacttcaagaacaaggtcaactattcatacgcggctgtacagatccctacggacatctacaaaggctccactgtcatcctcaatgagctcaactggacagaggccctggagaatgtgttcatggaaaaccgcagacaagaccccacactgctgtggcaggtcttcggcagcgccacaggagtcactcgctactacccggccaccccgtggcgagcccccaagaagatcgacctgtacgatgtccgaaggagaccctggtatatccagggggcctcgtcacccaaagacatggtcatcatcgtggatgtgagtggcagtgtgagcggcctgaccctgaagctgatgaagacatctgtctgcgagatgctggacacgctgtctgatgatgactatgtgaatgtggcctcgttcaacgagaaggcacagcctgtgtcatgcttcacacacctggtgcaggccaatgtgcgcaacaagaaggtgttcaaggaagctgtgcagggcatggtggccaagggcaccacaggctacaaggccggctttgagtatgcctttgaccagctgcagaactccaacatcactcgggccaactgcaacaagatgatcatgatgttcacggatggtggtgaggaccgcgtgcaggacgtctttgagaagtacaattggccaaaccggacggtgcgcgtgtttactttctccgtggggcagcataactatgacgtcacaccgctgcagtggatggcctgtgccaacaaaggctactattttgagatcccttccatcggagccatccgcatcaacacacaggaatatctagatgtgttgggcaggcccatggtgctggcaggcaaggaggccaagcaggtgcagtggaccaacgtgtatgaggatgcactgggactggggttggtggtaacagggaccctccctgttttcaacctgacacaggatggccctggggaaaagaagaaccagctgatcctgggcgtgatgggcattgacgtggctctgaatgacatcaagaggctgacccccaactacacgcttggagccaacggctatgtgtttgccattgacctgaacggctacgtgttgctgcaccccaatctcaagccccagaccaccaacttccgggagcctgtgactctggacttcctggatgcggagctagaggatgagaacaaggaagagatccgtcggagcatgattgatggcaacaagggccacaagcagatcagaacgttggtcaagtccctggatgagaggtacatagatgaggtgacacggaactacacctgggtgcctataaggagcactaactacagcctggggctggtgctcccaccctacagcaccttctacctccaagccaatctcagtgaccagatcctgcaggtcaagtattttgagttcctgctccccagcagctttgagtctgaaggacacgttttcattgctcccagagagtactgcaaggacctgaatgcctcagacaacaacaccgagttcctgaaaaactttattgagctcatggagaaagtgactccagactccaagcagtgcaacaacttccttctgcacaacctgatcttggacacgggcatcacgcagcagctggtagagcgtgtgtggagggaccaggatctcaacacgtacagcctactggccgtgttcgctgccacagacggtggcatcacccgagtcttccccaacaaggcagctgaggactggacagagaaccctgagcccttcaatgccagcttctaccgccgcagcctggataaccacggttatgtcttcaagcccccacaccaggatgccctgttaaggccgctggagctggagaatgacactgtgggcatcctcgtcagcacagctgtggagctcagcctaggcaggcgcacactgaggccagcagtggtgggcgtcaagctggacctagaggcttgggctgagaagttcaaggtgctagccagcaaccgtacccaccaagaccagcctcagaagtgcggccccaacagccactgtgagatggactgcgaggttaacaatgaggacttactctgtgtcctcattgatgatggaggattcctggtgctgtcaaaccagaaccatcagtgggaccaggtgggcaggttcttcagtgaggtggatgccaacctgatgctggcactctacaataactccttctacacccgcaaggagtcctatgactatcaggcagcctgtgcccctcagccccctggcaacctgggtgctgcaccccggggtgtctttgtgcccaccgttgcagatttccttaacctggcctggtggacctctgctgccgcctggtccctgttccagcagcttctctacggcctcatctaccacagctggttccaagcagaccccgcggaggccgaggggagccccgagacgcgcgagagcagctgcgtcatgaaacagacccagtactacttcggctcggtaaacgcctcctacaacgccatcatcgactgcggaaactgctccaggctgttccacgcgcagagactgaccaacaccaatcttctctttgtggtggccgagaagccgctgtgcagccagtgcgaggctggccggctgctgcagaaggagacgcactcggacggcccggagcagtgtgagctagtgcagagaccgcgataccggagaggcccgcacatctgcttcgactacaacgcgacagaagatacctcagactgtggccgcggggcctccttcccgccgtcgctgggcgtcctggtctccctgcaactgctgctcctcctgggcctgccgccccggccgcagcctcaagtcctcgtccacgcctctcgccgcctctgagcaccctgccccaccccacctccactcccacctcacccggcctcttcgcctttcccaccctcctgccccacactccccgccttagagcctcgtccctccctcactgaaggacctgagctggccaggccctgagagtctggtctgcgccttgggatggggagtcccaaagcgggacgccgcaggtgtttggcacccaaatcacatctcacctccgaactgttcaagtgtccccagacccttcttgcctgctgggctccccccagtgggatgggacagggaggccacacgcactggtgccaaaaccaggcctctgctgccgcccttcctggaggctgcctatgttgggggggaccctgcctcagctgacccggcctctctgccccacccaagcccaaacttggtttctgtgagaatagtggaggaaggtgagatggccagtttgaagcctgtgcctcccagcttaaatcctagcaggagagaggctctggggcagcccccatgggctcctgcccctttcaggcctacagccacatccccaagcccaccaggtgtcaggatagtcacagtgatac

SEQ ID NO: 176 - protein, 1139 aa, Homo sapiens
MAVPARTCGASRPGPARTARPWPGCGPHPGPGTRRPTSGPPRPLWLLLPLLPLLAAPGASAYSFPQQHTMQHWARRLEQEVDGVMRIFGGVQQLREIYKDNRNLFEVQENEPQKLVEKVAGDIESLLDRKVQALKRLADAAENFQKAHRWQDNIKEEDIVYYDAKADAELDDPESEDVERGSKASTLRLDFIEDPNFKNKVNYSYAAVQIPTDIYKGSTVILNELNWTEALENVFMENRRQDPTLLWQVFGSATGVTRYYPATPWRAPKKIDLYDVRRRPWYIQGASSPKDMVIIVDVSGSVSGLTLKLMKTSVCEMLDTLSDDDYVNVASFNEKAQPVSCFTHLVQANVRNKKVFKEAVQGMVAKGTTGYKAGFEYAFDQLQNSNITRANCNKMIMMFTDGGEDRVQDVFEKYNWPNRTVRVFTFSVGQHNYDVTPLQWMACANKGYYFEIPSIGAIRINTQEYLDVLGRPMVLAGKEAKQVQWTNVYEDALGLGLVVTGTLPVFNLTQDGPGEKKNQLILGVMGIDVNDIKRLTPNYTLGANGYVFAIDLNGYVLLHPNLKPQTTNFREPVTLDFLDAELEDENKEEIRRSMIDGNKGHKQIRTLVKSLDERYIDEVTRNYTWVPIRSTNYSLGLVLPPYSTFYLQANLSDQILQVKYFEFLLPSSFESEGHVFIAPREYCKDLNASDNNTEFLKNFIELMEKVTPDSKQCNNFLLHNLILDTGITQQLVERVWRDQDLNTYSLLAVFAATDGGITRVFPNKAAEDWTENPEPFNASFYRRSLDNHGYVFKPPHQDALLRPLELENDTVGILVSTAVELSLGRRTLRPAVVGVKLDLEAWAEKFKVLNRTHQDQPQKCGPNSHCEMDCEVNNEDLLCVLIDDGGFLVLSNQNHQWDQVGRFFSEVDANLMLALYNNSFYTRKESYDYQAACAPQPPGNLGAAPRGVFVPTVADFLNLAWWTSAAAWSLFQQLLYGLIYHSWFQADPAEAEGSPETRESSCVMKQTQYYFGSVNASYNAIIDCGNCSRLFHAQRLTNTNLLFVVAEKPLCSQCEAGRLLQKETHSDGPEQCELVQRPRYRRGPHICFDYNATEDTSDCGRGASFPPSLGVLVSLQLLLLLGLPPRPQPQVLVHASRRL
